(19) United States
(12) Patent Application Publication
(10) Pub. No.: US 2017/0129926 A1
(43) Pub. Date: May 11, 2017

(54) New Polypeptide

(71) Applicants: AFFIBODY AB, Solna (SE); AbClon Inc., SEOUL (KR)

(72) Inventors: Fredrik Frejd, Stockholm (SE); Lindvi Gudmundsdotter, Stockholm (SE)

(73) Assignee: AbClon Inc., SEoul (KR)

(21) Appl. No.: 15/317,633

(22) PCT Filed: Jun. 15, 2015
(86) PCT No.: PCT/EP2015/063364

§ 371 Date: Dec. 9, 2016

(30) Foreign Application Priority Data
Jun. 13, 2014 (EP) 14172344.5

(51) Int. Cl. C07K 14/31; C07K 16/24

(52) U.S. Cl. CPC C07K 14/31; C07K 16/241; C07K 2317/21; C07K 2319/70; C07K 2319/21; A61K 38/00

(57) ABSTRACT

The present disclosure relates to complex comprising an engineered polypeptide having affinity for interleukin-6 (in the following referred to as IL-6) and an antibody or an antigen binding fragment thereof, wherein said engineered polypeptide having affinity for IL-6 belongs to a class of engineered polypeptides comprising the sequence EEX₃X₄AWX₇EIHX₁₁ LPNLX₁₆X₁₇X₁₈QX₂₀X₂₁AFIX₂₅X₂₆LX₂₈X₂₉. The present disclosure also relates to the use of said complex as a therapeutic agent.

### FIELD OF THE INVENTION

[0001] The present disclosure relates to a complex comprising an engineered polypeptide having affinity for interleukin-6 (in the following referred to as IL-6) and an antibody or an antigen binding fragment thereof, wherein said engineered polypeptide having affinity for IL-6 belongs to a class of engineered polypeptides comprising the sequence EEX₃X₄AWX₇EIH X₁₁LPNLX₁₆X₁₇X₁₈QX₂₀X₂₁AFIX₂₅X₂₆LX₂₈X₂₉.

[0002] The present disclosure also relates to the use of said complex as a therapeutic agent.

### BACKGROUND

[0003] Inflammation is a cytokine-driven response by the innate immune system to destroy for example pathogens and damaged cells. In some disease conditions, such as rheumatoid arthritis (RA) and Crohn's disease, the regulation of the inflammatory system is impaired leading to tissue damages. Among the most studied inducers of inflammation are the cytokines interleukin-6 (IL-6) and tumor necrosis factor (TNF). Different inhibitors of TNF are available for clinical use, such as the anti-TNF monoclonal antibodies adalimumab (Humira®) and infliximab (Remicade®) as well as the TNF receptor 2-Fc fusion etanercept (Enbrel®). The antibody tocilizumab (Actemra®), which binds to the IL-6 receptor α (IL-6Rα) rather than the cytokine itself, has been approved for clinical use for IL-6 related disorders. The choice between an IL-6 or TNF blocking anti-inflammatory therapeutic strategy for treating RA is not trivial. Whereas anti-TNF strategies have so far been considered as standard (Taylor and Feldmann, 2009, Nature Reviews Rheumatology 5:578-582), a recent shoulder-to-shoulder monotherapy phase IV trial (ADACTA) in RA patients showed that tocilizumab was more effective than adalimumab in reducing RA-related symptoms (Gabay et al, 2013, Lancet 381:1541-1550).

[0004] Human IL-6 consists of a single polypeptide chain of 184 amino acids with a molecular weight of 21 kDa, however a variable glycosylation pattern accounts for sizes varying between 21-26 kDa. IL-6 is secreted by a wide variety of cell types including T cells, B cells, monocytes, fibroblasts, hepatocytes, endothelial cells and keratinocytes. Downstream signaling induces the transition from acute inflammation to either acquired immunity or chronic inflammatory disease. IL-6 signaling and its regulation is complex and involves a number of factors and mechanisms. IL-6 signals via the classical IL-6 signaling pathway, also known as the cis-signaling pathway, or via the trans-signaling pathway. In the classical IL-6 signaling pathway, circulating IL-6 binds to a membrane bound IL-6 receptor α (IL-6Rα) followed by recruitment of the membrane anchored gp130 co-receptor, which results in the formation of a ternary complex. This complex subsequently dimerizes with a second adjacent ternary complex leading to signal transduction via the gp130 moieties (Boulanger et al., 2003, Science 300(5628): 2101-2104). In circulation, IL-6 can also exist bound to soluble ectodomains of IL-6Rα. Such complexes are responsible for the trans-signaling mechanism, involving IL-6 dependent activation of any cells that express the co-receptor gp130 but lack IL-6Rα (Chalaris et al, 2011, Eur J Cell Biol 90(6-7): 484-494; Assier et al, 2010, Joint Bone Spine 77(6):532-6). The trans-signaling, or pro-inflammatory, pathway has been suggested to be the pathway most related to disease conditions, and thus blocking of said pathway is of high interest. In contrast, the classical pathway is regarded to be responsible for important anti-inflammatory and regenerative processes (Scheller et al, 2011, Biochim Biophys Acta 1813(5): 878-888).

[0005] Other drug candidates, in addition to tocilizumab, are being developed in order to address different IL-6 triggered pathways. These include the antibodies CNTO136 (sirukumab) (Xu et al, 2011, Br J Clin Pharmacol 72(2):270-281; Zhuang et al, 2013, Int J Clin Pharmacol Ther 51(3):187-199) and MEDI5117 (Finch et al, 2011, J Mol Biol 411(4):791-807), which both bind to the IL-6 cytokine itself, as well as a gp130-Fc fusion CR5/18 aimed at selectively blocking the trans-signaling pathway (Kopf et al, 2010, Nat Rev Drug Discov 9(9):703-718; Chalaris et al, 2012, Dig Dis 30(5):492-499).

[0006] Recently, considerable progress has been made in the development of antibodies with ability to bind to more than one antigen, for example through engineering of the complementarity determining regions (CDRs) to address two antigens in a single antibody combining site (Bostrom et al, 2009, Science 323(5921):1610-1614; Schaefer et al, 2011, Cancer Cell 20(4):472-486), via construction of heterodimeric antibodies using engineered Fc units (Carter, 2001, J Immunol Methods 248(1-2):7-15; Schaefer et al, 2011, Proc Natl Acad Sci USA 108(27):11187-11192) and via genetic fusion of auxiliary recognition units to N- or C-termini of light or heavy chains of full-length antibodies (Kanakaraj et al, 2012, MAbs 4(5):600-613; LaFleur et al, 2013, MAbs 5(2):208-218).

[0007] Thus, there is a high unmet medical need that warrants the development of new modes of treatment for inflammatory and autoimmune disorders, such as for example various forms of rheumatoid arthritis and psoriasis, by blocking more than one factor associated with inflammatory and autoimmune disorders. The provision of agents with dual or even multiple affinity, such as agents with a high affinity for IL-6 and for one or more additional factor(s) associated with inflammatory and autoimmune disorders, is of high importance.

### SUMMARY OF THE INVENTION

[0008] It is an object of the present disclosure to provide a new multispecific agent, such as a bispecific agent, which could for example be used for therapeutic applications.

[0009] It is an object of the present disclosure to provide a new multispecific agent, such as a bispecific agent, which has affinity for IL-6 and at least one additional antigen.

[0010] It is an object of the present disclosure to provide a molecule allowing for efficient therapy targeting various forms of inflammatory and autoimmune diseases while alleviating the abovementioned and other drawbacks of current therapies.

[0011] These and other objects which are evident to the skilled person from the present disclosure are met by different aspects of the invention as claimed in the appended claims and as generally disclosed herein.

[0012] Thus, in the first aspect of the disclosure, there is provided a complex comprising at least one IL-6 binding polypeptide and at least one antibody or an antigen binding fragment thereof, wherein said IL-6 binding polypeptide comprises an IL-6 binding motif BM, which motif consists of an amino acid sequence selected from
[0013] i) EEX₃X₄AWX₇EIHX₁₁LPNLX₁₆X₁₇X₁₈QX₂₀X₂₁AFIX₂₅X₂₆LX₂₈X₂₉
   wherein, independently from each other,

[0014] X₃ is selected from A, F, H, K, Q, R, S, W and Y;

[0015] X₄ is selected from A, D, E, F, H, I, K, L, M, N, Q, R, S, T, V and Y;

[0016] X₇ is selected from F, H, I, K, L, M, N, R, S, T, V, W and Y;

[0017] X₁₁ is selected from A, I, K, L, M, N, R, S, T and V;

[0018] X₁₆ is selected from N and T;

[0019] X₁₇ is selected from A, I, T and V;

[0020] X₁₈ is selected from D, E, G, H, K, N, Q, R, S and T;

[0021] X₂₀ is selected from I, L, M, R, T and V;

[0022] X₂₁ is selected from A, S, T and V;

[0023] X₂₅ is selected from I, M, Q, S, T, V and W;

[0024] X₂₆ is selected from K and S;

[0025] X₂₈ is selected from F, L, M and Y; and

[0026] X₂₉ is selected from D and R;

and
[0027] ii) an amino acid sequence which has at least 93% identity to the sequence defined in i).

[0028] When used herein to denote the first aspect of the disclosure, the term “complex” is intended to refer to two or more associated polypeptide chains, one having an affinity for IL-6 by virtue of its IL-6 binding motif as defined above, and the other being an antibody or an antigen binding fragment thereof. These polypeptide chains may each contain different protein domains, and the resulting multiprotein complex can have multiple functions. “Complex” intends to refer to two or more polypeptides as defined herein, connected by covalent bonds, for example two or more polypeptide chains connected by covalent bonds through expression thereof as a recombinant fusion protein, or associated by chemical conjugation.

[0029] The definition above of sequence-related, IL-6 binding polypeptides is based on a statistical analysis of a number of random polypeptide variants of a parent scaffold, that were selected for their interaction with IL-6 in several different selection experiments. The identified IL-6 binding motif, or “BM”, corresponds to the target binding region of the parent scaffold, which region constitutes two alpha helices within a three-helical bundle protein domain. In the parent scaffold, the varied amino acid residues of the two BM helices constitute a binding surface for interaction with the constant Fc part of antibodies. In the present disclosure, the random variation of binding surface residues and subsequent selection of variants have replaced the Fc interaction capacity with a capacity for interaction with IL-6.

[0030] As the skilled person will realize, the function of any polypeptide, such as the IL-6 binding capacity of the polypeptide of the present disclosure, is dependent on the tertiary structure of the polypeptide. It is therefore possible to make minor changes to the sequence of amino acids in a polypeptide without affecting the function thereof. Thus, the disclosure encompasses modified variants of the IL-6 binding polypeptide, which are such that the IL-6 binding characteristics are retained.

[0031] In this way, also encompassed by the present disclosure is a complex as defined herein comprising an IL-6 binding polypeptide, which polypeptide comprises an amino acid sequence with 93% or greater identity to a polypeptide as defined in i). In some embodiments, the polypeptide may comprise a sequence which is at least 96% identical to a polypeptide as defined in i). For example, it is possible that an amino acid residue belonging to a certain functional grouping of amino acid residues (e.g. hydrophobic, hydrophilic, polar etc) could be exchanged for another amino acid residue from the same functional group.

[0032] In some embodiments, such changes may be made in any position of the sequence of the IL-6 binding polypeptide as disclosed herein. In other embodiments, such changes may be made only in the non-variable positions, also denoted scaffold amino acid residues. In such cases, changes are not allowed in the variable positions, i.e. positions denoted with an “X” in sequence i).

[0033] The term “% identity”, as used throughout the specification, may for example be calculated as follows. The query sequence is aligned to the target sequence using the CLUSTAL W algorithm (Thompson et al, Nucleic Acids Research, 22:4673-4680 (1994)). A comparison is made over the window corresponding to the shortest of the aligned sequences. The shortest of the aligned sequences may in some instances be the target sequence. In other instances, the query sequence may constitute the shortest of the aligned sequences. The amino acid residues at each position are compared and the percentage of positions in the query sequence that have identical correspondences in the target sequence is reported as % identity.

[0034] As used herein “Xₙ” and “Xₘ” are used to indicate amino acids in positions n and m in the sequence i) as defined above, wherein n and m are integers which indicate the position of an amino acid within said sequence as counted from the N-terminal end of said sequence. For example, X₃ and X₇ indicate the amino acid in position three and seven, respectively, from the N-terminal end of sequence i).

[0035] In embodiments according to the first aspect, there is provided a complex, wherein Xₙ in sequence i) is independently selected from a group of possible residues according to Table 1. The skilled person will appreciate that Xₙ may be selected from any one of the listed groups of possible residues and that this selection is independent from the selection of amino acids in Xₘ, wherein n≠m. Thus, any of the listed possible residues in position Xₙ in Table 1 may be independently combined with any of the listed possible residues in any other variable position in Table 1.

[0036] The skilled person will appreciate that Table 1 is to be read as follows: In one embodiment according to the first aspect, there is provided a complex as defined herein comprising at least one IL-6 binding polypeptide, wherein “Xₙ” in sequence i) is selected from “Possible residues”. Thus, Table 1 discloses several specific and individualized embodiments of the first aspect of the present disclosure. For example, in one embodiment according to the first aspect, there is provided a complex wherein X₃ in sequence i) is selected from A, H, K, Q, R and Y, and in another embodiment according to the first aspect, there is provided a complex wherein X₃ in sequence i) is selected from A, K, Q, R and Y. For avoidance of doubt, the listed embodiments may be freely combined in yet other embodiments. For example, one such combined embodiment is a complex in which X₃ is selected from A, K, R and Y, while X₄ is selected from H and K, and X₁₁ is selected from A, I, L and T.

TABLE 1
Embodiments of the first aspect of the present disclosure

| Xₙ | Possible residues |
|---|---|
| X₃ | A, F, H, K, Q, R, W, Y |
| X₃ | A, H, K, Q, R, S, W, Y |
| X₃ | A, H, K, Q, R, W, Y |
| X₃ | A, H, K, Q, R, Y |
| X₃ | A, K, Q, R, Y |
| X₃ | A, K, R, Y |
| X₃ | A, K, R |
| X₃ | A, R, Y |
| X₃ | K, R |
| X₃ | A, R |
| X₃ | R, Y |
| X₃ | R |
| X₃ | K |
| X₃ | A |
| X₃ | Y |
| X₄ | A, D, E, F, H, K, L, M, N, Q, |
| | R, S, T, V, Y |
| X₄ | A, D, E, F, H, I, K, M, N, Q, R, |
| | S, T, V, Y |
| X₄ | A, D, E, F, H, K, L, M, N, Q, R |
| X₄ | A, D, E, F, H, K, M, N, Q, R, |
| | S, T, V, Y |
| X₄ | A, D, E, F, H, K, N, Q, R, S, |
| | T, Y |
| X₄ | A, D, E, H, K, N, Q, R, S, T, Y |
| X₄ | A, D, E, H, K, Q, R, T |
| X₄ | A, D, E, F, H, K, M, Q, R, S, |
| | T, V, Y |
| X₄ | A, D, E, F, H, K, Q, R, S, T, V |
| X₄ | A, D, E, H, K, Q, R |
| X₄ | A, D, E, H, K, R |
| X₄ | D, E, H, K, R |
| X₄ | A, D, E, K, R |
| X₄ | A, D, E, H, K |
| X₄ | D, E, K, R |
| X₄ | A, D, E, K |
| X₄ | D, E, H, K |
| X₄ | D, H, K, Q |
| X₄ | E, H, K, R |
| X₄ | D, E, R |
| X₄ | D, E, K |
| X₄ | H, K, Q |
| X₄ | D, K, Q |
| X₄ | D, H, Q |
| X₄ | D, H, K |
| X₄ | E, H, K |
| X₄ | E, H, R |
| X₄ | H, K, R |
| X₄ | K, E, R |
| X₄ | D, E |
| X₄ | R, E |
| X₄ | K, E |
| X₄ | E, H |
| X₄ | D, K |
| X₄ | H, K |
| X₄ | K, Q |
| X₄ | K, D |
| X₄ | D, Q |
| X₄ | H, Q |
| X₄ | K |
| X₄ | H |
| X₄ | D |
| X₄ | Q |
| X₄ | E |
| X₄ | R |
| X₇ | F, H, I, K, L, M, N, R, T, V, W, |
| | Y |
| X₇ | F, H, I, K, L, M, N, R, T, W, Y |
| X₇ | F, H, I, L, M, N, R, T, W, Y |
| X₇ | F, H, K, L, M, N, R, S, T, V, |
| | W, Y |
| X₇ | F, H, K, L, M, N, R, T, V, W, |
| | Y |
| X₇ | F, H, K, L, M, N, R, T, W, Y |
| X₇ | F, H, L, M, N, R, T, W, Y |
| X₇ | F, H, R, T, W, Y |
| X₇ | F, I, N, R, T, W, Y |
| X₇ | F, I, R, W, Y |
| X₇ | F, N, R, W, Y |
| X₇ | F, R, T, W, Y |
| X₇ | F, H, T, W, Y |
| X₇ | F, H, W, Y |
| X₇ | F, T, W, Y |
| X₇ | F, R, W, Y |
| X₇ | F, H, L, M, R, T, V, W, Y |
| X₇ | F, H, R, T, W, Y |
| X₇ | I, R, W, Y |
| X₇ | F, W, Y |
| X₇ | F, R, Y |
| X₇ | R, W, Y |
| X₇ | I, R, Y |
| X₇ | I, W, Y |
| X₇ | F, Y |
| X₇ | W, Y |
| X₇ | I, Y |
| X₇ | R, Y |
| X₇ | F |
| X₇ | W |
| X₇ | Y |
| X₇ | I |
| X₇ | R |
| X₁₁ | A, I, K, L, N, R, S, T, V |
| X₁₁ | A, I, K, L, M, N, S, T, V |
| X₁₁ | A, I, K, L, N, S, T, V |
| X₁₁ | A, I, K, L, S, T, V |
| X₁₁ | A, I, K, L, N, T, V |
| X₁₁ | A, I, K, L, T, V |
| X₁₁ | A, I, K, L, T |
| X₁₁ | I, K, L, T |
| X₁₁ | A I, L, T |
| X₁₁ | A I, K, L |
| X₁₁ | A, K, L, N, S, T |
| X₁₁ | A, K, L, N, S |
| X₁₁ | A, K, L, S, T |
| X₁₁ | A, K, L, S |
| X₁₁ | K, L, S |
| X₁₁ | A, K, L |
| X₁₁ | A, I, L |
| X₁₁ | I, L |
| X₁₁ | A, L, N |
| X₁₁ | A, L |
| X₁₁ | L, N |
| X₁₁ | L |
| X₁₁ | A |
| X₁₁ | N |
| X₁₁ | S |
| X₁₁ | I |
| X₁₁ | K |
| X₁₁ | T |
| X₁₆ | N |
| X₁₆ | T |
| X₁₇ | I, T, V |
| X₁₇ | A, I, V |
| X₁₇ | I, V |
| X₁₇ | I |
| X₁₇ | V |
| X₁₈ | D, E, H, K, N, Q, R, S, T |
| X₁₈ | D, E, G, H, N, Q, R, S, T |
| X₁₈ | D, E, H, N, Q, R, S, T |
| X₁₈ | D, E, H, N, Q, S, T |
| X₁₈ | D, E, N, Q, S, T |
| X₁₈ | D, E, N, S, T |
| X₁₈ | D, E, Q, S, T |
| X₁₈ | D, E, S, T |
| X₁₈ | D, E, Q, S |
| X₁₈ | D, E, N, S |
| X₁₈ | D, E, S |
| X₁₈ | D, E, N |
| X₁₈ | D, E |
| X₁₈ | E |
| X₁₈ | D |
| X₂₀ | I, L, M, R, V |
| X₂₀ | I, M, R, T, V |
| X₂₀ | I, M, R, V |
| X₂₀ | I, L, M, V |
| X₂₀ | I, M, V |
| X₂₀ | I, M |
| X₂₀ | M, V |
| X₂₀ | M |
| X₂₁ | A, S, T |
| X₂₁ | A, S, V |
| X₂₁ | A, S |
| X₂₁ | A, V |
| X₂₁ | A, T |
| X₂₁ | A |
| X₂₅ | I, Q, S, T, V, W |
| X₂₅ | I, Q, S, T, V |
| X₂₅ | I, Q, S, T, W |
| X₂₅ | I, Q, S, T |
| X₂₅ | I, S, T |
| X₂₅ | Q, S, T |
| X₂₅ | S, T, W |
| X₂₅ | S, T |
| X₂₅ | S |
| X₂₅ | T |
| X₂₆ | K |
| X₂₆ | S |
| X₂₈ | F, L, Y |
| X₂₈ | F, M, Y |
| X₂₈ | F, L, M |
| X₂₈ | F, L |
| X₂₈ | F, Y |
| X₂₈ | F |
| X₂₉ | D |
| X₂₉ | R |

[0037] In one particular embodiment according to the first aspect, there is provided a complex as defined herein comprising at least one IL-6 binding polypeptide, wherein in sequence i),

[0038] X₃ is selected from A, H, K, Q, R and Y;

[0039] X₄ is selected from A, D, E, F, H, I, K, L, M, N, Q, R, S, T, V and Y;

[0040] X₇ is selected from F, H, I, K, L, M, N, R, T, V, W and Y;

[0041] X₁₁ is selected from A, I, K, L, N, S, T and V;

[0042] X₁₆ is T;

[0043] X₁₇ is selected from A, I, T and V;

[0044] X₁₈ is selected from D, E, H, K, N, Q, R, S and T;

[0045] X₂₀ is selected from I, L, M, R and V;

[0046] X₂₁ is selected from A, S and V;

[0047] X₂₅ is selected from I, Q, S, T, V and W;

[0048] X₂₆ is K;

[0049] X₂₈ is selected from F, L, M and Y; and

[0050] X₂₉ is D.

[0051] In a more specific embodiment defining a sub-class of complexes comprising at least one IL-6 binding polypeptide, sequence i) fulfills at least six of the eleven conditions I-XI:
[0052] I. X₃ is selected from K and R;
[0053] II. X₁₁ is selected from A and L;
[0054] III. X₁₆ is T;
[0055] IV. X₁₇ is selected from I and V;
[0056] V. X₁₈ is selected from D and E;
[0057] VI. X₂₀ is M;
[0058] VII. X₂₁ is A;
[0059] VIII. X₂₅ is selected from S and T;
[0060] IX. X₂₆ is K;
[0061] X. X₂₈ is F; and
[0062] XI. X₂₉ is D.

[0063] In some examples of said complex according to the first aspect, sequence i) fulfils at least seven of the eleven conditions I-XI. More specifically, sequence i) may fulfill at least eight of the eleven conditions I-XI, such as at least nine of the eleven conditions I-XI, such as at least ten of the eleven conditions I-XI, such as all of the eleven conditions I-XI.

[0064] In some embodiments of a complex according to the first aspect, said complex comprises at least one IL-6 binding polypeptide, wherein in sequence i) X₁₇X₂₀X₂₁ is selected from VMA and IMA. In some embodiments, X₂₀X₂₁X₂₈ in sequence i) is MAF. In some embodiments, X₁₇X₂₀X₂₈ in sequence i) is selected from VMF and IMF. In some embodiments, X₁₇X₂₁X₂₈ in sequence i) is selected from VAF and IAF.

[0065] As described in detail in the experimental section to follow, the selection of IL-6 binding polypeptide variants has led to the identification of a number of individual IL-6 binding motif (BM) sequences, which constitute different embodiments of sequence i). Complexes comprising said different embodiments of sequence i) constitute individual embodiments of the complex according to the first aspect. The sequences of individual IL-6 binding motifs correspond to amino acid positions 8-36 in SEQ ID NO:1-1551 presented in FIG. 1. Hence, in one embodiment of a complex according to this aspect, sequence i) corresponds to the sequence from position 8 to position 36 in a sequence selected from the group consisting of SEQ ID NO:1-1551. In one embodiment, sequence i) corresponds to the sequence from position 8 to position 36 in a sequence selected from the group consisting of SEQ ID NO:1-1502. In one embodiment, sequence i) corresponds to the sequence from position 8 to position 36 in a sequence selected from the group consisting of SEQ ID NO:7, SEQ ID NO:15-89 and SEQ ID NO:151-871. In one embodiment, sequence i) corresponds to the sequence from position 8 to position 36 in a sequence selected from the group consisting of SEQ ID NO:1-6, SEQ ID NO:8-14, SEQ ID NO:90-150 and SEQ ID NO:872-1502. In one embodiment, sequence i) corresponds to the sequence from position 8 to position 36 in a sequence selected from the group consisting of SEQ ID NO:1-152 and SEQ ID NO:1503-1515. In one embodiment, sequence i) corresponds to the sequence from position 8 to position 36 in a sequence selected from the group consisting of SEQ ID NO:1-150 and SEQ ID NO:1503-1515. In one embodiment, sequence i) corresponds to the sequence from position 8 to position 36 in a sequence selected from the group consisting of SEQ ID NO:1-152. In another embodiment, sequence i) corresponds to the sequence from position 8 to position 36 in a sequence selected from the group consisting of SEQ ID NO:1-150. In yet another embodiment, sequence i) corresponds to the sequence from position 8 to position 36 in a sequence selected from the group consisting of SEQ ID NO:7, SEQ ID NO:15-89 and SEQ ID NO:151-152. In one embodiment, sequence i) corresponds to the sequence from position 8 to position 36 in a sequence selected from the group consisting of SEQ ID NO:1-6, SEQ ID NO:8-14 and SEQ ID NO:90-150. In one embodiment, sequence i) corresponds to the sequence from position 8 to position 36 in a sequence selected from the group consisting of SEQ ID NO:1-14 and SEQ ID NO:1503-1515. In one embodiment, sequence i) corresponds to the sequence from position 8 to position 36 in a sequence selected from the group consisting of SEQ ID NO:1-14 and SEQ ID NO:1512. In one embodiment, sequence i) corresponds to the sequence from position 8 to position 36 in a sequence selected from the group consisting of SEQ ID NO:1-14. In one embodiment, sequence i) corresponds to the sequence from position 8 to position 36 in a sequence selected from the group consisting of SEQ ID NO:1-5. In one embodiment, sequence i) corresponds to the sequence from position 8 to position 36 in SEQ ID NO:1512. In specific individual embodiments, sequence i) corresponds to the sequence from position 8 to position 36 in any one of SEQ ID NO:1-14 individually.

[0066] In some embodiments of the present disclosure, the BM as defined above “forms part of” a three-helix bundle protein domain. This is understood to mean that the sequence of the BM is “inserted” into or “grafted” onto the sequence of the original three-helix bundle domain, such that the BM replaces a similar structural motif in the original domain. For example, without wishing to be bound by theory, the BM is thought to constitute two of the three helices of a three-helix bundle, and can therefore replace such a two-helix motif within any three-helix bundle. As the skilled person will realize, the replacement of two helices of the three-helix bundle domain by the two BM helices has to be performed so as not to affect the basic structure of the polypeptide. That is, the overall folding of the Ca backbone of the polypeptide according to this embodiment of the invention is substantially the same as that of the three-helix bundle protein domain of which it forms a part, e.g. having the same elements of secondary structure in the same order etc. Thus, a BM according to the disclosure “forms part” of a three-helix bundle domain if the polypeptide according to this embodiment of the aspect has the same fold as the original domain, implying that the basic structural properties are shared, those properties e.g. resulting in similar CD spectra. The skilled person is aware of other parameters that are relevant.

[0067] In particular embodiments, the complex as defined herein comprises at least one IL-6 binding motif (BM), which forms part of a three-helix bundle protein domain. For example, the BM may essentially constitute two alpha helices with an interconnecting loop, within said three-helix bundle protein domain. In particular embodiments, said three-helix bundle protein domain is selected from domains of bacterial receptor proteins. Non-limiting examples of such domains are the five different three-helical domains of Protein A from Staphylococcus aureus, such as domain B, and derivatives thereof. In some embodiments, the three-helical bundle protein domain is a variant of protein Z, which is derived from domain B of staphylococcal Protein A.

[0068] In some embodiments of the complex as described herein, wherein said IL-6 binding polypeptide forms part of a three-helix bundle protein domain, the complex comprises at least one IL-6 binding polypeptide, which in turn comprises a binding module (BMod), the amino acid sequence of which is selected from:

iii)
K-[BM]-DPSQSXₐX_{b}LLX_{c}EAKKLX_{d}XₑX_{f}Q;

wherein

[0069] [BM] is an IL-6 binding motif as defined herein, provided that X₂₉ is D;

[0070] Xₐ is selected from A and S;

[0071] X_{b} is selected from N and E;

[0072] X_{c} is selected from A, S and C;

[0073] X_{d} is selected from E, N and S;

[0074] Xₑ is selected from D, E and S;

[0075] X_{f} is selected from A and S; and
[0076] iv) an amino acid sequence which has at least 91% identity to a sequence defined by iii).

[0077] It may be beneficial in some embodiments that the complex as a whole, or at least part of the complex such as the IL-6 binding polypeptide, exhibits high structural stability, such as resistance to isomerization, to chemical modifications, to changes in physical conditions and to proteolysis, during production and storage, as well as in vivo. Thus, in other embodiments where the IL-6 binding polypeptide as disclosed herein forms part of a three-helix bundle protein domain, the complex comprises at least one IL-6 binding polypeptide, which in turn comprises a binding module (BMod), the amino acid sequence of which is selected from:

v)
K-[BM]-DPSQSXₐX_{b}LLX_{c}EAKKLX_{d}XₑX_{f}Q,

wherein

[0078] [BM] is an IL-6 binding motif as defined herein, provided that X₂₉ is R;

[0079] Xₐ is selected from A and S;

[0080] X_{b} is selected from N and E;

[0081] X_{c} is selected from A, S and C;

[0082] X_{d} is selected from E, N and S;

[0083] Xₑ is selected from D, E and S;

[0084] X_{f} is selected from A and S; and
[0085] vi) an amino acid sequence which has at least 91% identity to a sequence defined by v).

[0086] As discussed above, IL-6 binding polypeptides comprising minor changes as compared to the above amino acid, which do not largely affect the tertiary structure and the function of the polypeptide are also within the scope of the present disclosure. Thus, in some embodiments, the complex as defined herein comprises at least one IL-6 binding polypeptide, which comprises sequence iv) or vi) having at least 93%, such as at least 95%, such as at least 97% identity to a sequence defined by iii) and v), respectively.

[0087] In one embodiment, Xₐ in sequence iii) or v) is A.

[0088] In one embodiment, Xₐ in sequence iii) or v) is S.

[0089] In one embodiment, X_{b} in sequence iii) or v) is N.

[0090] In one embodiment, X_{b} in sequence iii) or v) is E.

[0091] In one embodiment, X_{c} in sequence iii) or v) is A.

[0092] In one embodiment, X_{c} in sequence iii) or v) is S.

[0093] In one embodiment, X_{c} in sequence iii) or v) is C.

[0094] In one embodiment, X_{d} in sequence iii) or v) is E.

[0095] In one embodiment, X_{d} in sequence iii) or v) is N.

[0096] In one embodiment, X_{d} in sequence iii) or v) is S.

[0097] In one embodiment, Xₑ in sequence iii) or v) is D.

[0098] In one embodiment, Xₑ in sequence iii) or v) is E.

[0099] In one embodiment, Xₑ in sequence iii) or v) is S.

[0100] In one embodiment, X_{d}Xₑ in sequence iii) or v) is selected from EE, ES, SE, SD and SS.

[0101] In one embodiment, X_{d}Xₑ in sequence iii) or v) is ES.

[0102] In one embodiment, X_{d}Xₑ in sequence iii) or v) is SE.

[0103] In one embodiment, X_{d}Xₑ in sequence iii) or v) is SD.

[0104] In one embodiment, X_{f} in sequence iii) or v) is A.

[0105] In one embodiment, X_{f} in sequence iii) or v) is S.

[0106] In one embodiment, in sequence iii) or v), Xₐ is A; X_{b} is N; X_{c} is A and X_{f} is A.

[0107] In one embodiment, in sequence iii) or v), Xₐ is A; X_{b} is N; X_{c} is C and X_{f} is A.

[0108] In one embodiment, in sequence iii) or v), Xₐ is S; X_{b} is E; X_{c} is S and X_{f} is S.

[0109] In one embodiment, in sequence iii) or v), Xₐ is S; X_{b} is E; X_{c} is C and X_{f} is S.

[0110] In one embodiment, in sequence iii) or v), Xₐ is A; X_{b} is N; X_{c} is A; X_{d}Xₑ is ND and X_{f} is A.

[0111] In one embodiment, in sequence iii) or v), Xₐ is A; X_{b} is N; X_{c} is C; X_{d}Xₑ is ND and X_{f} is A.

[0112] In one embodiment, in sequence iii) or v), Xₐ is S; X_{b} is E; X_{c} is S; X_{d}Xₑ is ND and X_{f} is S.

[0113] In one embodiment, in sequence iii) or v), Xₐ is S; X_{b} is E; X_{c} is C; X_{d}Xₑ is ND and X_{f} is S.

[0114] In one embodiment, in sequence iii) or v), Xₐ is A; X_{b} is N; X_{c} is A; X_{d}Xₑ is SE and X_{f} is A.

[0115] In one embodiment, in sequence iii) or v), Xₐ is A; X_{b} is N; X_{c} is C; X_{d}Xₑ is SE and X_{f} is A.

[0116] In one embodiment, in sequence iii) or v), Xₐ is S; X_{b} is E; X_{c} is S; X_{d}Xₑ is SE and X_{f} is S.

[0117] In one embodiment, in sequence iii) or v), Xₐ is S; X_{b} is E; X_{c} is C; X_{d}Xₑ is SE and X_{f} is S.

[0118] In one embodiment, in sequence iii) or v), Xₐ is A; X_{b} is N; X_{c} is A; X_{d}Xₑ is SD and X_{f} is A.

[0119] In one embodiment, in sequence iii) or v), Xₐ is A; X_{b} is N; X_{c} is C; X_{d}Xₑ is SD and X_{f} is A.

[0120] In one embodiment, in sequence iii) or v), Xₐ is S; X_{b} is E; X_{c} is S; X_{d}Xₑ is SD and X_{f} is S.

[0121] In one embodiment, in sequence iii) or v), Xₐ is S; X_{b} is E; X_{c} is C; X_{d}Xₑ is SD and X_{f} is S.

[0122] In one embodiment, in sequence iii) or v), Xₐ is A; X_{b} is N; X_{c} is A; X_{d}Xₑ is ES and X_{f} is A.

[0123] In one embodiment, in sequence iii) or v), Xₐ is A; X_{b} is N; X_{c} is C; X_{d}Xₑ is ES and X_{f} is A.

[0124] In one embodiment, in sequence iii) or v), Xₐ is S; X_{b} is E; X_{c} is S; X_{d}Xₑ is ES and X_{f} is S.

[0125] In one embodiment, in sequence iii) or v), Xₐ is S; X_{b} is E; X_{c} is C; X_{d}Xₑ is ES and X_{f} is S.

[0126] In yet another embodiment of said complex, sequence iii) corresponds to the sequence from position 7 to position 55 in a sequence selected from the group consisting of SEQ ID NO:1-1551 presented in FIG. 1. In another embodiment, sequence iii) corresponds to the sequence from position 7 to position 55 in a sequence selected from the group consisting of SEQ ID NO:1-1502. In one embodiment, sequence iii) corresponds to the sequence from position 7 to position 55 in a sequence selected from the group consisting of SEQ ID NO:7, SEQ ID NO:15-89 and SEQ ID NO:151-871. In one embodiment, sequence iii) corresponds to the sequence from position 7 to position 55 in a sequence selected from the group consisting of SEQ ID NO:1-6, SEQ ID NO:8-14, SEQ ID NO:90-150 and SEQ ID NO:872-1502. In one embodiment, sequence iii) corresponds to the sequence from position 7 to position 55 in a sequence selected from the group consisting of SEQ ID NO:1-152 and SEQ ID NO:1503-1515. In one embodiment, sequence iii) corresponds to the sequence from position 7 to position 55 in a sequence selected from the group consisting of SEQ ID NO:1-150 and SEQ ID NO:1503-1515. In one embodiment, sequence iii) corresponds to the sequence from position 7 to position 55 in a sequence selected from the group consisting of SEQ ID NO:1-152. In another embodiment, sequence iii) corresponds to the sequence from position 7 to position 55 in a sequence selected from the group consisting of SEQ ID NO:1-150. In yet another embodiment, sequence iii) corresponds to the sequence from position 7 to position 55 in a sequence selected from the group consisting of SEQ ID NO:7, SEQ ID NO:15-89 and SEQ ID NO:151-152. In one embodiment, sequence iii) corresponds to the sequence from position 7 to position 55 in a sequence selected from the group consisting of SEQ ID NO:1-6, SEQ ID NO:8-14 and SEQ ID NO:90-150. In one embodiment, sequence iii) corresponds to the sequence from position 7 to position 55 in a sequence selected from the group consisting of SEQ ID NO:1-14 and SEQ ID NO:1503-1515. In one embodiment, sequence iii) corresponds to the sequence from position 7 to position 55 in a sequence selected from the group consisting of SEQ ID NO:1-14 and SEQ ID NO:1512. In one embodiment, sequence iii) corresponds to the sequence from position 7 to position 55 in a sequence selected from the group consisting of SEQ ID NO:1-14. In one embodiment, sequence iii) corresponds to the sequence from position 7 to position 55 in a sequence selected from the group consisting of SEQ ID NO:1-5. In one embodiment, sequence iii) corresponds to the sequence from position 7 to position 55 in SEQ ID NO:1512. In specific individual embodiments, sequence iii) corresponds to the sequence from position 7 to position 55 in any one of SEQ ID NO:1-14 individually.

[0127] Also, in a further embodiment, there is provided a complex as defined herein comprising at least one IL-6 binding polypeptide, wherein said IL-6 binding polypeptide comprises an amino acid sequence selected from:

vii) YA-[BMod]-AP;
wherein [BMod] is an IL-6 binding module as defined above; and
viii) an amino acid sequence which has at least 90% identity to a sequence defined by vii).

[0128] Alternatively, there is provided a complex as defined herein comprising at least one IL-6 binding polypeptide, wherein said IL-6 binding polypeptide comprises an amino acid sequence selected from:

### ix) FN-[BMod]-AP;

[0129] wherein [BMod] is an IL-6 binding module as defined above; and
x) an amino acid sequence which has at least 90% identity to a sequence defined by ix).

[0130] As discussed above, IL-6 binding polypeptides comprising minor changes as compared to the above amino acid sequences, which do not largely affect the tertiary structure and the function of the polypeptide, also fall within the scope of the present disclosure. Thus, in some embodiments, sequence viii) and x) may for example be least 92%, such as at least 94%, such as at least 96%, such as at least 98% identical to a sequence defined by vii) and ix), respectively.

[0131] In some embodiments, the complex as defined herein comprises an IL-6 binding motif, which forms part of a polypeptide comprising an amino acid sequence selected from

ADNNFNK-[BM]-DPSQSANLLSEAKKLNESQAPK;
ADNKFNK-[BM]-DPSQSANLLAEAKKLNDAQAPK;
ADNKFNK-[BM]-DPSVSKEILAEAKKLNDAQAPK;
ADAQQNNFNK-[BM]-DPSQSTNVLGEAKKLNESQAPK;
AQHDE-[BM]-DPSQSANVLGEAQKLNDSQAPK;
VDNKFNK-[BM]-DPSQSANLLAEAKKLNDAQAPK;
AEAKYAK-[BM]-DPSESSELLSEAKKLNKSQAPK;
VDAKYAK-[BM]-DPSQSSELLAEAKKLNDAQAPK;
VDAKYAK-[BM]-DPSQSSELLAEAKKLNDSQAPK;
AEAKYAK-[BM]-DPSQSSELLSEAKKLNDSQAPK;
AEAKYAK-[BM]-DPSQSSELLSEAKKLSESQAPK;
AEAKYAK-[BM]-QPEQSSELLSEAKKLSESQAPK;
AEAKYAK-[BM]-DPSQSSELLSEAKKLESSQAPK;
AEAKYAK-[BM]-QPEQSSELLSEAKKLESSQAPK;
VDAKYAK-[BM]-DPSQSSELLSEAKKLNDSQAPK;
VDAKYAK-[BM]-DPSQSSELLSEAKKLSESQAPK;
VDAKYAK-[BM]-QPEQSSELLSEAKKLSESQAPK;
VDAKYAK-[BM]-DPSQSSELLSEAKKLESSQAPK;
VDAKYAK-[BM]-QPEQSSELLSEAKKLESSQAPK;
VDAKYAK-[BM]-DPSQSSELLAEAKKLNKAQAPK;
and
AEAKYAK-[BM]-DPSQSSELLAEAKKLNKAQAPK;

wherein [BM] is an IL-6 binding motif as defined above.

[0132] In one embodiment, the complex as defined herein comprises an IL-6 binding motif, which comprises an amino acid sequence selected from:

xi)
VDAKYAK-[BM]-DPSQSSELLSEAKKLNDSQAPK;

[0133] wherein [BM] is an IL-6 binding motif as defined above; and
[0134] xii) an amino acid sequence which has at least 89% identity to the sequence defined in xi).

[0135] In another embodiment, the complex as defined herein comprises an IL-6 binding motif, which comprises an amino acid sequence selected from:

xiii)
AEAKYAK-[BM]-DPSQSSELLSEAKKLNDSQAPK;

[0136] wherein [BM] is an IL-6 binding motif as defined above; and
[0137] xiv) an amino acid sequence which has at least 89% identity to the sequence defined in xiii).

[0138] Again, polypeptides comprising minor changes as compared to the above amino acid sequences, which do not largely affect the tertiary structure and the function of the polypeptide, also fall within the scope of the present disclosure. Thus, in some embodiments, sequence xii) and xiv) may for example be at least 91%, such as at least 93%, such as at least 94%, such as at least 96%, such as at least 98% identical to the sequence defined by xi) and xiii), respectively.

[0139] Sequence xi) in such a polypeptide may be selected from the group consisting of SEQ ID NO:1-1551. In another embodiment, sequence xi) is selected from the group consisting of SEQ ID NO:1-1502. In one embodiment, sequence xi) is selected from the group consisting of SEQ ID NO:7, SEQ ID NO:15-89 and SEQ ID NO:151-871. In one embodiment, sequence xi) is selected from the group consisting of SEQ ID NO:1-6, SEQ ID NO:8-14, SEQ ID NO:90-150 and SEQ ID NO:872-1502. In one embodiment, sequence xi) is selected from the group consisting of SEQ ID NO:1-152 and SEQ ID NO:1503-1515. In one embodiment, sequence xi) is selected from the group consisting of SEQ ID NO:1-150 and SEQ ID NO:1503-1515. In one embodiment, sequence xi) is selected from the group consisting of SEQ ID NO:1-152. In another embodiment, sequence xi) is selected from the group consisting of SEQ ID NO:1-150. In yet another embodiment, sequence xi) is selected from the group consisting of SEQ ID NO:7, SEQ ID NO:15-89 and SEQ ID NO:151-152. In one embodiment, sequence xi) is selected from the group consisting of SEQ ID NO:1-6, SEQ ID NO:8-14 and SEQ ID NO:90-150. In one embodiment, sequence xi) is selected from the group consisting of SEQ ID NO:1-14 and SEQ ID NO:1503-1515. In one embodiment, sequence xi) is selected from the group consisting of SEQ ID NO:1-14 and SEQ ID NO:1512. In one embodiment, sequence xi) is selected from the group consisting of SEQ ID NO:1-14. In one embodiment, sequence xi) is selected from the group consisting of from SEQ ID NO:1-5. In one embodiment, sequence xi) is SEQ ID NO:1512. In specific individual embodiments, sequence xi) is any one of SEQ ID NO:1-14 individually.

[0140] The skilled person will understand that various modifications and/or additions can be made to an IL-6 binding polypeptide as defined herein, to an antibody or antigen binding fragment thereof, or to the complex as a whole as defined herein in order to tailor the complex to a specific application without departing from the scope of the present disclosure.

[0141] Thus, in one embodiment there is provided a complex as defined herein, wherein said IL-6 binding polypeptide and/or said antibody or antigen binding fragment thereof or said complex as a whole comprises additional amino acids at at least one C-terminal and/or N-terminal end. Such a complex should be understood as a complex having one or more additional amino acid residues at an N-terminal and/or C-terminal position in the polypeptide chain of the IL-6 binding polypeptide and/or of the antibody or antigen binding fragment thereof. Alternatively, if the complex is expressed as a fusion protein, said complex should be understood as having one or more additional amino acid residues at the N-terminal and/or C-terminal position of the complex as a whole. Thus, said complex may comprise any suitable number of additional amino acid residues, for example at least one additional amino acid residue. Each additional amino acid residue may individually or collectively be added in order to, for example, improve production, purification, stabilization in vivo or in vitro, coupling or detection of the complex. Such additional amino acid residues may comprise one or more amino acid residues added for the purpose of chemical coupling. One example of this is the addition of a cysteine residue. Additional amino acid residues may also provide a “tag” for purification or detection of the polypeptide, such as a His₆ tag, a (HisGlu)₃ tag (“HEHEHE” tag) or a “myc” (c-myc) tag or a “FLAG” tag for interaction with antibodies specific to the tag or immobilized metal affinity chromatography (IMAC) in the case of a His₆-tag.

[0142] The further amino acids as discussed above may be coupled to an IL-6 binding polypeptide as defined herein, to an antibody or antigen binding fragment thereof or to said complex as a whole by means of chemical conjugation (using known organic chemistry methods) or by any other means, such as via expression of the IL-6 binding polypeptide, antibody or antigen binding fragment thereof or complex as a fusion protein or joined in any other fashion, either directly or via a linker, for example an amino acid linker.

[0143] In one embodiment, there is provided a complex as defined herein, wherein said IL-6 binding polypeptide is in a multimeric form. Said multimer is understood to comprise at least two IL-6 binding polypeptides as disclosed herein as monomer units, the amino acid sequences of which may be the same or different. Multimeric forms of the polypeptides may comprise a suitable number of domains, each having an IL-6 binding motif, and each forming a monomer within the multimer. These domains may have the same amino acid sequence, but alternatively, they may have different amino acid sequences. In other words, the complex according to the disclosure may comprise an IL-6 binding polypeptide in the form of homo- or heteromultimers, for example homo- or heterodimers. In one embodiment, there is provided a complex as defined herein, wherein the IL-6 binding polypeptide monomeric units are covalently coupled together. In another embodiment, said IL-6 binding polypeptide monomer units are expressed as a fusion protein. In one embodiment, there is provided an IL-6 binding polypeptide in dimeric form.

[0144] The present aspect provides a complex which comprises an antibody or an antigen binding fragment thereof. As is well known, antibodies are immunoglobulin molecules capable of specific binding to a target (an antigen), such as a carbohydrate, polynucleotide, lipid, polypeptide or other, through at least one antigen recognition site located in the variable region of the immunoglobulin molecule. As used herein, the term “antibody or an antigen binding fragment thereof” encompasses not only full-length or intact polyclonal or monoclonal antibodies, but also antigen-binding fragments thereof, such as Fab, Fab′, F(ab)₂, Fab₃, Fv and variants thereof, fusion proteins comprising one or more antibody portions, humanized antibodies, chimeric antibodies, minibodies, diabodies, triabodies, tetrabodies, linear antibodies, single chain antibodies, multispecific antibodies (e.g., bispecific antibodies) and any other modified configuration of the immunoglobulin molecule that comprises an antigen recognition site of the required specificity, including glycosylation variants of antibodies, amino acid sequence variants of antibodies and covalently modified antibodies. Further examples of modified antibodies and antigen binding fragments thereof include nanobodies, AlbudAbs, DARTs (dual affinity re-targeting), BiTEs (bispecific T-cell engager), TandAbs (tandem diabodies), DAFs (dual acting Fab), two-in-one antibodies, SMIPs (small modular immunopharmaceuticals), FynomAbs (fynomers fused to antibodies), DVD-Igs (dual variable domain immunoglobulin), CovX-bodies (peptide modified antibodies), duobodies and triomAbs. This listing of variants of antibodies and antigen binding fragments thereof is not to be seen as limiting, and the skilled person is aware of other suitable variants.

[0145] A full-length antibody comprises two heavy chains and two light chains. Each heavy chain contains a heavy chain variable region (V_{H}) and first, second and third constant regions (C_{H}1, C_{H}2 and C_{H}3). Each light chain contains a light chain variable region (V_{L}) and a light chain constant region (C_{L}). Depending on the amino acid sequence of the constant domain of its heavy chains, antibodies are assigned to different classes. There are six major classes of antibodies: IgA, IgD, IgE, IgG, IgM and IgY, and several of these may be further divided into subclasses (isotypes), e.g., IgG1, IgG2, IgG3, IgG4, IgA1 and IgA2. The term “full-length antibody” as used herein refers to an antibody of any class, such as IgD, IgE, IgG, IgA, IgM or IgY (or any sub-class thereof). The subunit structures and three-dimensional configurations of different classes of antibodies are well known.

[0146] An “antigen binding fragment” is a portion or region of an antibody molecule, or a derivative thereof, that retains all or a significant part of the antigen binding of the corresponding full-length antibody. An antigen binding fragment may comprise the heavy chain variable region (V_{H}), the light chain variable region (V_{L}), or both. Each of the V_{H} and V_{L} typically contains three complementarity determining regions CDR1, CDR2 and CDR3. The three CDRs in V_{H} or V_{L} are flanked by framework regions (FR1, FR2, FR3 and FR4). As briefly listed above, examples of antigen binding fragments include, but are not limited to: (1) a Fab fragment, which is a monovalent fragment having a V_{L}-C_{L} chain and a V_{H}-C_{H}1 chain; (2) a Fab′ fragment, which is a Fab fragment with the heavy chain hinge region, (3) a F(ab′)₂ fragment, which is a dimer of Fab′ fragments joined by the heavy chain hinge region, for example linked by a disulfide bridge at the hinge region; (4) an Fc fragment; (5) an Fv fragment, which is the minimum antibody fragment having the V_{L} and V_{H} domains of a single arm of an antibody; (6) a single chain Fv (scFv) fragment, which is a single polypeptide chain in which the V_{H} and V_{L} domains of an scFv are linked by a peptide linker; (7) an (scFv)₂, which comprises two V_{H} domains and two V_{L} domains, which are associated through the two V_{H} domains via disulfide bridges and (8) domain antibodies, which can be antibody single variable domain (V_{H} or V_{L}) polypeptides that specifically bind antigens.

[0147] Antigen binding fragments can be prepared via routine methods. For example, F(ab′)₂ fragments can be produced by pepsin digestion of a full-length antibody molecule, and Fab fragments can be generated by reducing the disulfide bridges of F(ab′)₂ fragments. Alternatively, fragments can be prepared via recombinant technology by expressing the heavy and light chain fragments in suitable host cells (e.g., E. coli, yeast, mammalian, plant or insect cells) and having them assembled to form the desired antigen-binding fragments either in vivo or in vitro. A single-chain antibody can be prepared via recombinant technology by linking a nucleotide sequence coding for a heavy chain variable region and a nucleotide sequence coding for a light chain variable region. For example, a flexible linker may be incorporated between the two variable regions. The skilled person is aware of methods for the preparation of both full-length antibodies and antigen binding fragments thereof.

[0148] Thus, in one embodiment, this aspect of the disclosure provides a complex as defined herein, wherein said at least one antibody or antigen binding fragment thereof is selected from the group consisting of full-length antibodies, Fab fragments, Fab′ fragments, F(ab′)₂ fragments, Fc fragments, Fv fragments, single chain Fv fragments, (scFv)₂ and domain antibodies. In one embodiment, said at least one antibody or antigen binding fragment thereof is selected from full-length antibodies, Fab fragments and scFv fragments. In one particular embodiment, said at least one antibody or antigen binding fragment thereof is a full-length antibody.

[0149] In one embodiment of said complex as defined herein, the antibody or antigen binding fragment thereof is selected from the group consisting of monoclonal antibodies, human antibodies, humanized antibodies, chimeric antibodies, and antigen-binding fragments thereof.

[0150] The term “monoclonal antibodies” as used herein refers to antibodies having monovalent affinity, meaning that each antibody molecule in a sample of the monoclonal antibody binds to the same epitope on the antigen, whereas the term “polyclonal antibodies” as used herein refers to a collection of antibodies that react against a specific antigen, but in which collection there may be different antibody molecules for example identifying different epitopes on the antigen. Polyclonal antibodies are typically produced by inoculation of a suitable mammal and are purified from the mammal's serum. Monoclonal antibodies are made by identical immune cells that are clones of a unique parent cell (for example a hybridoma cell line). The term “human antibody” as used herein refers to antibodies having variable and constant regions corresponding substantially to, or derived from, antibodies obtained from human subjects. The term “chimeric antibodies” as used herein, refers to recombinant or genetically engineered antibodies, such as for example mouse monoclonal antibodies, which contain polypeptides or domains from a different species, for example human, introduced to reduce the antibodies' immunogenicity. The term “humanized antibodies” refers to antibodies from non-human species whose protein sequences have been modified to increase their similarity to antibody variants produced naturally in humans, in order to reduce immunogenicity.

[0151] It may be beneficial for a complex as defined herein to, in addition to being capable of binding IL-6, target at least one additional antigen. In one embodiment, said additional antigen is associated with a disease or disorder of the immune system. In another embodiment, said additional antigen is associated with cancer. Thus, in one embodiment there is provided a complex as defined herein, wherein said antibody or antigen binding fragment thereof has affinity for an additional antigen, for example associated with a disease or disorder of the immune system, or associated with cancer. Non-limiting examples include antigens associated with an IL-6 related disorder of the immune system, as well as antigens associated with any other IL-6 related disorder. In one embodiment, the antigen is selected from the group consisting of angiogenin 2 (Ang-2), vascular endothelial growth factor (VEGF), tumor necrosis factors (TNF), tumor necrosis factor ligand super family member 11 (TNFSF11), TNFSF13, TNFSF13B, TNFSF14, TNFSF15, insulin-like growth factor (IGF), interleukin 1α (IL-1α), interleukin 1β (IL-1β), interleukin 10 (IL-10), interleukin 17A (IL-17), interleukin 12 (IL-12), interleukin 23 (IL-23), interleukin 33 (IL-33), granulocyte macrophage colony-stimulating factor (GM-CSF), granulocyte colony-stimulating factor (G-CSF), high-mobility group protein B1 (HMGB1), lipopolysaccharide (LPS), toll-like receptor 4 (TLR4), nerve growth factor (NGF), chemokine C-C motif ligand 19 (CCL19), chemokine C-C motif ligand 21 (CCL21), chemokine C-X-C motif ligand 4 (CXCL4) and interferon alpha.

[0152] In one particular embodiment, said antigen is selected from the group consisting of IL-1β, TNF, GM-CSF, G-CSF, IL-12, IL-23, IL-17, HMGB1, LPS and TLR4. In one embodiment, said antigen is a cytokine, for example being selected from the group consisting of IL-1β, TNF, GM-CSF, G-CSF, IL-12, IL-23 and IL-17. In one particular embodiment, said antigen is TNF.

[0153] In one embodiment, said antibody or fragment thereof is selected from the group consisting of adalimumab, infliximab, golimumab, certolimumab pegol, and antigen binding fragments thereof. In another embodiment said antibody or fragment thereof is a full-length antibody selected from the group consisting of adalimumab, infliximab, golimumab and certolimumab pegol. In one particular embodiment, said antibody or antigen binding fragment thereof is adalimumab or an antigen binding fragment thereof, for example full-length adalimumab.

[0154] Other non-limiting examples of additional targets for binding by the complex as defined herein are half-life extending targets. When the complex binds to such a target, the in vivo half-life of the complex is extended. In one particular embodiment, the additional target is albumin. In one embodiment, said albumin binding activity is provided by including the albumin binding domain of streptococcal protein G or a derivative thereof into the complex as defined herein.

[0155] Binding of a complex as defined herein to IL-6 may interfere with canonical cis- and/or with trans-signaling via IL-6 in vivo or in vitro. Thus, in one embodiment, there is provided a complex as defined herein which is capable of blocking IL-6 dependent signaling via the cis-signaling pathway. In another embodiment, the complex as defined herein is capable of blocking IL-6 dependent signaling via the trans-signaling pathway. In another embodiment, the complex as defined herein is capable of blocking IL-6 dependent signaling via both the cis-signaling pathway and the trans-signaling pathway.

[0156] The half maximal inhibitory concentration (IC50) is a measure of the effectiveness of a substance in inhibiting a specific biological or biochemical function. This quantitative measure indicates how much of a particular substance is needed to inhibit a given biological process by half, and is commonly used in the art. In one particular embodiment, there is provided a complex as defined herein capable of blocking IL-6 signaling such that the half maximal inhibitory concentration (IC50) of the blocking is at most 1×10⁻⁶ M, such as at most 1×10⁻⁷ M, such as at most 1×10⁻⁸ M, such as at most 1×10⁻⁹ M, such as at most 1×10⁻¹⁰ M. This blocking may be of either the cis- or the trans-signaling pathway. In one embodiment, said complex is capable of blocking the interaction of IL-6/IL-6Rα with gp130.

[0157] In the following section, TNF is used as an illustrative example of the additional antigen as described above and thus should not be viewed as limiting. Thus, the methods for measuring affinity are equally well suited to measure the affinity of a complex as described herein for any other suitable additional antigen.

[0158] The terms “IL-6 binding”, “binding affinity for IL-6”, “TNF binding” and “binding affinity for TNF”, as used herein, refer to a property of a polypeptide or complex as defined herein which may be tested for example by ELISA or the use of surface plasmon resonance (SPR) technology. For example as described in the examples below, binding affinity may be tested in an experiment in which samples of the polypeptide are captured on antibody-coated ELISA plates and biotinylated IL-6 (or biotinylated TNF) is added, followed by streptavidin conjugated HRP. TMB substrate is added and the absorbance at 450 nm is measured using a multi-well plate reader, such as Victor³ (Perkin Elmer). The skilled person may then interpret the results obtained by such experiments to establish at least a qualitative measure of the binding affinity of the complex for IL-6 (or TNF). If a quantitative measure is desired, for example to determine the EC50 value (the half maximal effective concentration) for the interaction, ELISA may also be used. The response of the polypeptide against a dilution series of biotinylated IL-6 (or biotinylated TNF) is measured using ELISA as described above. The skilled person may then interpret the results obtained by such experiments and EC50 values may be calculated from the results using for example GraphPad Prism 5 and non-linear regression.

[0159] The IL-6 binding affinity or affinity for an additional antigen, such as TNF, may also be tested in a surface plasmon resonance (SPR) experiment. The IL-6 (or TNF), or a fragment thereof, is immobilized on a sensor chip of a surface plasmon resonance (SPR) instrument, and the sample containing the complex to be tested is passed over the chip. Alternatively, the complex to be tested is immobilized on a sensor chip of the instrument, and a sample containing IL-6 (or TNF), or a fragment thereof, is passed over the chip. The skilled person may then interpret the results obtained by such experiments to establish at least a qualitative measure of the binding affinity of the complex for IL-6 (or TNF). If a quantitative measure is desired, for example to determine a K_{D} value for the interaction, surface plasmon resonance methods may also be used. Binding values may for example be defined in a Biacore (GE Healthcare) or ProteOn XPR 36 (Bio-Rad) instrument. IL-6 (or TNF) is suitably immobilized on a sensor chip of the instrument, and samples of the complex whose affinity is to be determined are prepared by serial dilution and injected in random order. K_{D} values may then be calculated from the results using for example the 1:1 Langmuir binding model of the BIAevaluation 4.1 software, or other suitable software, provided by the instrument manufacturer.

[0160] With regard to the complex defined herein, in one embodiment, it is capable of binding to IL-6 such that the EC50 value of the interaction is at most 1×10⁻⁷ M, such as at most 1×10⁻⁸ M, such as at most 1×10⁻⁹ M, such as at most 1×10⁻¹⁰ M.

[0161] In one embodiment, the complex is capable of binding to IL-6 such that the K_{D} value of the interaction is at most 1×10⁻⁸ M, such as at most 1×10⁻⁹ M, such as at most 1×10⁻¹⁰ M, such as at most 1×10⁻¹¹ M.

[0162] Binding of a complex as defined herein to an additional antigen may interfere with a signaling pathway involving said antigen in vivo or in vitro. For example, when said additional antigen is TNF, binding of said complex to TNF may interfere with TNF signaling in vivo or in vitro. Thus, in one embodiment, there is provided a complex as defined herein which is capable of blocking TNF dependent signaling. In one particular embodiment, there is provided a complex as defined herein capable of blocking TNF signaling such that the half maximal inhibitory concentration (IC50) of the blocking is at most 1×10⁻⁷ M, such as at most 1×10⁻⁸ M, such as at most 1×10⁻⁹ M, such as at most 1×10⁻¹⁰ M, such as at most 1×10⁻¹¹ M.

[0163] In one embodiment, the complex is capable of binding to TNF such that the K_{D} value of the interaction is at most 1×10⁻⁷ M, such as at most 1×10⁻⁸ M, such as at most 1×10⁻⁹ M, such as at most 1×10⁻¹⁰ M, such as at most 1×10⁻¹¹ M, such as at most 1×10⁻¹² M.

[0164] The complex as described herein may for example be present in the form of a fusion protein or a conjugate. Thus, said at least one IL-6 binding polypeptides and said at least one antibody, or antigen binding fragment thereof, may be coupled by means of chemical conjugation (using known organic chemistry methods) or by any other means, such as expression of the complex as a fusion protein or joined in any other fashion, either directly or via a linker, for example an amino acid linker.

[0165] Thus in one embodiment, there is provided a complex as defined herein, wherein said complex is a fusion protein or a conjugate. In one embodiment, said complex is a fusion protein. In another embodiment, said complex is a conjugate. In one embodiment of said complex, said IL-6 binding polypeptide is attached to the N-terminus or C-terminus of the heavy chain of said antibody or antigen binding fragment thereof. In another embodiment, said IL-6 binding polypeptide is attached to the N-terminus or C-terminus of the light chain of said antibody or antigen binding fragment thereof. In one embodiment, said IL-6 binding polypeptide is attached to the N-terminus and/or C-terminus of the light chain and heavy chain of said antibody or antigen binding fragment thereof. For example, the IL-6 binding polypeptide may be attached to only the N-terminus of the heavy chain(s), only the N-terminus of the light chain(s), only the C-terminus of the heavy chain(s), only the C-terminus of the light chain(s), both the N-terminus and the C-terminus of the heavy chain(s), both the N-terminus and the C-terminus of the light chain(s), only the C-terminus of the light chain(s) and the N-terminus of the heavy chain(s), only the C-terminus of the heavy chain(s) and the N-terminus of the light chain(s), of said antibody or antigen binding fragment thereof.

[0166] The skilled person is aware that the construction of a fusion protein often involves the use of linkers between the functional moieties to be fused, and there are different kinds of linkers with different properties, such as flexible amino acid linkers, rigid amino acid linkers and cleavable amino acid linkers. Linkers have been used to for example increase stability or improve folding of fusion proteins, to increase expression, improve biological activity, enable targeting and alter pharmacokinetics of fusion proteins. Thus, in one embodiment, said complex further comprising at least one linker, such as at least one linker selected from flexible amino acid linkers, rigid amino acid linkers and cleavable amino acid linkers. In one embodiment, said linker is arranged between said IL-6 binding polypeptide and said antibody or antigen binding fragment thereof.

[0167] Flexible linkers are often used in the art when the joined domains require a certain degree of movement or interaction, and may be particularly useful in some embodiments of the complex. Such linkers are generally composed of small, non-polar (for example G) or polar (for example S or T) amino acids. Some flexible linkers primarily consist of stretches of G and S residues, for example (GGGGS)ₚ. Adjusting the copy number “p” allows for optimization of linker in order to achieve appropriate separation between the functional moieties or to maintain necessary inter-moiety interaction. Apart from G and S linkers, other flexible linkers are known in the art, such as G and S linkers containing additional amino acid residues, such as T and A, to maintain flexibility, as well as polar amino acid residues to improve solubility. Examples of flexible linkers that are contemplated for use in the complex described herein also include KESGSVSSEQLAQFRSLD, EGKSSGSGSEKST and GSAGSAAGSGEF.

[0168] Thus in one embodiment, said linker is a flexible linker comprising glycine (G), serine (S) and/or threonine (T) residues. In one embodiment, said linker has a general formula selected from (GₙSₘ)ₚ and (SₘGₙ)ₚ, wherein, independently, n=1-7, m=0-7, n+m 8 and p=1-7. In one embodiment, n=1-5. In one embodiment, m=0-5. In one embodiment, p=1-5. In a more specific embodiment, n=4, m=1 and p=1-4. In an even more specific embodiment, said linker is (GGGGS)₃. In another specific embodiment, said linker is GGGGS. In another specific embodiment, said linker is VDGS. In another specific embodiment, said linker is ASGS.

[0169] In further aspects of the present disclosure, there is provided a polynucleotide encoding a complex as described herein; an expression vector comprising said polynucleotide; and a host cell comprising said expression vector.

[0170] Also encompassed by this disclosure is a method of producing a complex as described above, comprising culturing said host cell under conditions permissive of expression of said polypeptide from its expression vector, and isolating the polypeptide.

[0171] The complex of the present disclosure, or any one or more of its sub-component, polypeptide parts, e.g. an IL-6 binding polypeptide or an antigen binding fragment of an antibody, may alternatively be produced by non-biological peptide synthesis using amino acids and/or amino acid derivatives having protected reactive side-chains, the non-biological peptide synthesis comprising
[0172] step-wise coupling of the amino acids and/or the amino acid derivatives to form a polypeptide according to the first aspect having protected reactive side-chains,
[0173] removal of the protecting groups from the reactive side-chains of the polypeptide, and
[0174] folding of the polypeptide in aqueous solution.

[0175] Said complex may also be produced by the conjugation of at least one IL-6 binding polypeptide to at least one antibody or antigen binding fragment thereof as described herein. The skilled person is aware of conjugation methods known in the art, such as conventional chemical conjugation methods for example using charged succinimidyl esters or carbodiimides.

[0176] It should be understood that the complex as disclosed according to the present disclosure may be useful as a therapeutic agent for at least inhibiting IL-6 signaling. Said complex may furthermore be useful for an inhibiting signaling of an additional pathway, through an affinity of said antibody or antigen binding fragment thereof for an additional antigen which is a component of said additional signaling pathway. For example, said antibody or antigen binding fragment thereof may have affinity for TNF.

[0177] In another aspect, there is provided a composition comprising a complex as described herein and at least one pharmaceutically acceptable excipient or carrier.

[0178] In one embodiment, said composition further comprises at least one additional active agent, such as at least two additional active agents, such as at least three additional active agents. Non-limiting examples of additional active agents that may prove useful in such a composition are immune response modifying agents and anti-cancer agents.

[0179] Non limiting examples of immune response modifying agents that can be used as additional active agent in embodiments of the composition according to this aspect include immunosuppressive and immunomodulating agents, and other anti-inflammatory agents. For example, the complex as described herein may be used in combination with an agent selected from the group consisting of disease-modifying antirheumatic drugs (DMARDs), such as gold salts, azathioprine, methotrexate and leflunomide; calcineurin inhibitors, such as cyclosporin A or FK 506; modulators of lymphocyte recirculation; mTOR inhibitors, such as rapamycin; an ascomycin having immuno-suppressive properties; glucocorticoids; corticosteroids; cyclophosphamide; immunosuppressive monoclonal antibodies; adhesion molecule inhibitors, such as LFA-1 antagonists, ICAM-1 or -3 antagonists, VCAM-4 antagonists or VLA-4 antagonists; anti-TNF agents, such as etanercept or monoclonal antibodies to TNF, for example infliximab, adalimumab, golimumab and certolizumab pegol; blockers of proinflammatory cytokines; IL-1 blockers such as anakinra or IL-1 trap; IL-17 blockers; chemokine blockers; non steroidal anti-inflammatory drugs (NSAIDs) such as aspirin; and anti-infectious agents and other immune response modulating agents, as well as combinations thereof.

[0180] Non-limiting examples of anti-cancer agents that can be used as additional active agent in embodiments of the composition according to this aspect include agents selected from the group consisting of auristatin, anthracycline, calicheamycin, combretastatin, doxorubicin, duocarmycin, the CC-1065 anti-tumor antibiotic, ecteinsascidin, geldanamycin, maytansinoid, methotrexate, mycotoxin, taxol, ricin, bouganin, gelonin, pseudomonas exotoxin 38 (PE38), diphtheria toxin (DT), and their analogues, and derivates thereof and combinations thereof. A skilled person would appreciate that the non-limiting examples of cytotoxic agents include all possible variant of said agents, for example the agent auristatin includes for example auristatin E, auristatin F, auristatin PE, and derivates thereof.

[0181] The skilled person will appreciate that the complex as described herein or a pharmaceutical composition comprising said complex may be administered to a subject using standard administration techniques, such as including oral, topical, intravenous, intraperitoneal, subcutaneous, pulmonary, transdermal, intramuscular, intranasal, buccal, sublingual or suppository administration. Thus, in one embodiment there is provided a complex or pharmaceutical composition as described herein for oral, topical, intravenous, intraperitoneal, subcutaneous, pulmonary, transdermal, intramuscular, intranasal, buccal, sublingual or suppository administration.

[0182] Hence, in another aspect of the present disclosure, there is provided a complex or composition as described herein for use as a medicament. In one embodiment, said complex or composition modulates IL-6 function and the function of an additional antigen. Said additional antigen may be associated with a disease or disorder of the immune system in vivo, or associated with cancer. In one embodiment, there is provided a complex described herein, for use as a medicament to modulate IL-6 function in vivo. In one embodiment, said complex or composition is provided for use as a medicament to modulate IL-6 function and the function of an additional antigen, for example an additional antigen associated with a disease or disorder of the immune system in vivo, or associated with cancer. In one particular embodiment, said complex or composition is provided for use as a medicament to modulate IL-6 function and TNF function in vivo.

[0183] As used herein, the term “modulate” refers to changing the activity, such as rendering IL-6 function or the function of the additional antigen hypomorph, partially inhibiting or fully inhibiting IL-6 function or the function of the additional antigen.

[0184] As used herein, the term “IL-6 related disorder” refers to any disorder, disease or condition in which IL-6 plays a regulatory role in the signaling pathway. As used herein, the term “TNF related disorder” refers to any disorder, disease or condition in which TNF plays a regulatory role in the signaling pathway involved in the disease or disorder.

[0185] In one embodiment, there is provided a complex or composition as described herein for use in the treatment of an IL-6 related disorder, such as a disorder related to IL-6 and TNF.

[0186] A non-limiting list of IL-6 related disorders, for the treatment of which the complex or composition as described herein may be useful, include inflammatory disease, autoimmune disease, infectious disease, cancer, neoplastic disease, diabetes, neurological disease depression, rheumatoid arthritis (RA), juvenile RA, juvenile idiopathic arthritis, systemic juvenile idiopathic arthritis, vasculitis, psoriatic arthritis, psoriasis, ankylosing spondylitis, chronic inflammatory bowel disease such as Crohn's disease or ulcerative colitis, Grave's disease, Behçet's disease, uveitis, giant cell arteritis, multiple sclerosis (MS), systemic sclerosis, systemic lupus erythematosus (SLE), polymyositis, polymyalgia rheumatic, asthma, chronic obstructive pulmonary disease (COPD), relapsing polychondritis, pancreatitis, peritonitis, nephritis, Kawasaki's disease, Sjögren's syndrome, adult Still's disease, colitis associated cancer, renal cancer, kidney cancer, prostate cancer, malignant lymphoma, multiple myeloma, Castleman's disease, breast cancer, lung cancer, Alzheimer's disease, HIV, diabetes, sepsis, cachexia, myelodysplastic syndrome (MDS), liver cirrhosis, graft versus host disease, myocardial infarction, endometriosis and osteoporosis.

[0187] It is known in the art that treatment with anti-TNF agents is useful for treating amongst other ankylosing spondylitis, psoriatic arthritis, rheumatoid arthritis, juvenile idiopathic arthritis, plaque psoriasis, Crohn's disease and ulcerative colitis. Additionally, data from off-label use of anti-TNF agents indicate that TNF inhibition may result in rapid control of the inflammatory process in certain cases, such as Behçet's disease, non-infectious ocular inflammation, hidradenitis suppurativa and pyoderma gangrenosum. Additionally, there are ongoing clinical trials relating to the use of anti-TNF agents in the treatment of treatment-resistant major depression, Alzheimer's disease, pemphigus vulgaris, cutaneous manifestations of sarcoidosis, toxic epidermal necrolysis, lichen planus, inclusion body myositis and Kawasaki disease. (Karampetsou et al, 2010, International Journal of Medicine, Volume 103, No 12. 917-928). Thus, a non-limiting list of TNF related disorders, for the treatment of which the complex or composition as described herein may be useful in those embodiments where the additional antigen is TNF, include inflammatory disease, autoimmune disease, infectious disease, ankylosing spondylitis, psoriatic arthritis, rheumatoid arthritis, juvenile idiopathic arthritis, plaque psoriasis, chronic inflammatory bowel disease such as Crohn's disease or ulcerative colitis, Behçet's disease, non-infectious ocular inflammation, hidradenitis suppurativa, pyoderma gangrenosum, depression, Alzheimer's disease, pemphigus vulgaris, cutaneous manifestations of sarcoidosis, toxic epidermal necrolysis, lichen planus, inclusion body myositis and Kawasaki disease.

[0188] In one embodiment, said disorder is selected from the group consisting of ankylosing spondylitis, psoriatic arthritis, Crohn's disease, ulcerative colitis, rheumatoid arthritis, juvenile idiopathic arthritis and plaque psoriasis, such as the group consisting of ankylosing spondylitis, psoriatic arthritis, Crohn's disease, ulcerative colitis, rheumatoid arthritis and plaque psoriasis, such as the group consisting of ankylosing spondylitis, psoriatic arthritis, Crohn's disease, rheumatoid arthritis, juvenile idiopathic arthritis and plaque psoriasis, such as the group consisting of ankylosing spondylitis, psoriatic arthritis, Crohn's disease and rheumatoid arthritis, such as the group consisting of ankylosing spondylitis, psoriatic arthritis and rheumatoid arthritis.

[0189] In one particular embodiment, said disorder is selected from the group consisting of rheumatoid arthritis (RA), juvenile RA, juvenile idiopathic arthritis or systemic juvenile idiopathic arthritis. In a specific embodiment, said disorder is rheumatoid arthritis (RA).

[0190] In another particular embodiment, said disorder is chronic inflammatory bowel disease, such as Crohn's disease or ulcerative colitis.

[0191] In another embodiment, said disorder is cancer or neoplastic disease, such as a cancer or neoplastic disease selected from the group consisting of colitis associated cancer, renal cancer, kidney cancer, prostate cancer, malignant lymphoma, multiple myeloma, Castleman's disease, breast cancer and lung cancer.

[0192] In another embodiment, said disorder is selected from the group consisting of Alzheimer's disease, HIV, diabetes, sepsis, cachexia, myelodysplastic syndrome (MDS), liver cirrhosis, graft versus host disease, myocardial infarction, endometriosis and osteoporosis.

[0193] In a related aspect, there is provided a method of treatment of an IL-6 related disorder, comprising administering to a subject in need thereof an effective amount of a complex or composition as described herein. In a more specific embodiment of said method, the complex or composition as described herein modulates IL-6 function in vivo. In one embodiment, said complex or composition modulates IL-6 function and the function of an additional antigen, for example an antigen associated with a disease or disorder of the immune system in vivo, or an antigen associated with cancer. In one particular embodiment wherein said additional antigen is TNF, said complex or composition modulates IL-6 function and TNF function in vivo.

[0194] Embodiments relating to specific disorders and disclosed in the context of the aspect relating to the complex or composition as described herein for use in treatment, are equally relevant for the present aspect of a method of treatment. For the sake of brevity, the listings of disorders will not be repeated here.

[0195] It may be beneficial to administer a therapeutically effective amount of a complex or composition as described herein and at least one second drug substance, such as an immune response modulating agent as described above or an anti-cancer agent.

[0196] As used herein, the term “co-administration” encompasses both concomitant and sequential administration. Thus, in one embodiment there is provided a method as defined above further comprising co-administration of an immune response modulating agent as described above. In another embodiment there is provided a method as defined above further comprising co-administration of an anti-cancer agent as described above.

[0197] While the invention has been described with reference to various exemplary aspects and embodiments, it will be understood by those skilled in the art that various changes may be made and equivalents may be substituted for elements thereof without departing from the scope of the invention. In addition, many modifications may be made to adapt a particular situation or molecule to the teachings of the invention without departing from the essential scope thereof. Therefore, it is intended that the invention not be limited to any particular embodiment contemplated, but that the invention will include all embodiments falling within the scope of the appended claims.

### BRIEF DESCRIPTION OF THE FIGURES

[0198] FIG. 1 is a listing of amino acid sequences of examples of IL-6 binding Z variant polypeptides (SEQ ID NO:1-1551), control Z variant polypeptides (SEQ ID NO:1552-1553), the albumin binding domain (ABD) variant PP013 (SEQ ID NO:1554), human IL-6 (SEQ ID NO:1555) and murine IL-6 (SEQ ID NO:1556) used for selection, screening and/or characterization, two different heavy chain sequences (HC_{Ada} and HC2_{Ada}; SEQ ID NO:1557 and 1559) and one light chain sequence (LC_{Ada}; SEQ ID NO:1558) of TNF binding monoclonal antibodies Ada and Ada2. In the IL-6 binding polypeptides, the deduced IL-6 binding motifs (BM) extend from position 8 to position 36 in each sequence. The amino acid sequences of the 49 amino acid residues long polypeptides predicted to constitute the complete three-helix bundle within each of these Z variants (BMod) extend from position 7 to position 55.

[0199] FIG. 2 shows the result of blocking of the interaction between hIL-6 and hIL-6Rα, assayed as described in Example 2. In contrast to the hIL-6Rα binding antibody tocilizumab (black), which was included for comparison, the tested IL-6 binding Z variants (gray) did not interfere with the binding of hIL-6 to its receptor hIL-6Rα.

[0200] FIG. 3 shows the result of blocking of the binding of pre-mixed hIL-6/hIL-6Rα to hgp130, assayed as described in Example 2. Concentration dependent blocking was seen for all tested primary IL-6 binding Z variants (gray) as well as for tocilizumab (black), which was included for comparison. The calculated IC50 value of each variant is shown in Table 3.

[0201] FIG. 4 shows concentration dependent inhibition of IL-6 mediated trans-signaling in a gp130 expressing human umbilical vein endothelial cell (HUVEC) based system, assayed as described in Example 2. IL-6 binding Z variants C-terminally fused to the ABD variant PP013 (SEQ ID NO:1554) inhibited the trans-signaling, whereas the control Z variant Z03638 (SEQ ID NO:1552) in fusion with PP013 did not. Tocilizumab was included for comparison.

[0202] FIG. 5 shows the result of blocking of the binding of pre-mixed hIL-6/hIL-6Rα to hgp130, assayed as described in Example 7. Concentration dependent blocking was seen for all tested maturated IL-6 binding Z variants (gray) as well as for tocilizumab (black) and the primary binder Z06814 (SEQ ID NO:1512; broken line), which were both included for comparison. All maturated IL-6 binding Z variants showed more efficient blocking than the primary binders assayed in Example 2 (compare FIG. 3).

[0203] FIG. 6 shows the result of the TF-1 cell neutralizing assay described in Example 7. Concentration dependent inhibition of IL-6 induced TF-1 cell proliferation was seen for all tested IL-6 binding Z variants (matured Z variants shown in black; primary binder Z06814 (SEQ ID NO:1512) shown as grey filled triangles) and for tocilizumab (grey filled squares), but not for the negative control antibody hIgG (grey filled circles).

[0204] FIG. 7 shows the in vivo efficacy of the Z variant Z06814 (SEQ ID NO:1512) in fusion with the ABD variant PP013 (SEQ ID NO:1554) as scored by assaying IL-6 triggered serum amyloid-A (SAA) protein release in an anti-arthritic mouse model as described in Example 8. Four groups of mice were given 0 (filled squares), 0.025 (open dots), 2.5 (open triangles) or 25 (closed triangles) mg/kg body weight of the IL-6 binding Z06814-ABD fusion protein. As a control, mice were given 25 mg/kg of a control Z variant (Z04726; SEQ ID NO:1553) in fusion with ABD (referred to as Z_{control}-ABD) (open squares). Mice were injected with hIL-6 and subsequently the levels of SAA protein were measured. Two additional control groups of mice received PBS (filled circles) and 25 mg/kg Z06814-ABD (crosses), respectively, but no subsequent IL-6 injection.

[0205] FIG. 8 shows a schematic representation of the design of four complexes according to the disclosure, produced as described in Example 9. “Z” denotes the IL-6 targeting Z variant Z06814 (SEQ ID NO:1512), which was genetically fused in all constructs to the anti-TNF monoclonal antibody Ada via a 15 residue (GGGGS)₃-linker. A) Z06814-HC_{Ada}: Z06814 fused to the N terminus of the heavy chain of Ada; B) Z06814-LC_{Ada}: Z06814 fused to the N terminus of the light chain of Ada; C) LC_{Ada}-Z06814: Z06814 fused to the C terminus of the light chain of Ada; and D) HC_{Ada}-Z06814: Z06814 fused to the C terminus of the heavy chain of Ada.

[0206] FIG. 9 shows the result of SDS-PAGE analysis of the complex variants shown in FIG. 7, produced in CHO cells and purified by protein A affinity chromatography. Lane 1: Novex Sharp Molecular weight standard (216, 160, 110, 80, 60, 50, 40, 30, 20, 15, 10, 3.5 kDa); lane 2: Ada (non-reduced); lane 3: Z06814-HC_{Ada} (non-reduced); lane 4: Z06814-LC_{Ada} (non-reduced); lane 5: HC_{Ada}-Z06814 (non-reduced); lane 6: LC_{Ada}-Z06814 (non-reduced); lane 7: Molecular weight standard as in lane 1; lane 8: Ada (reduced); lane 9: Z06814-HC_{Ada} (reduced); lane 10: Z06814-LC_{Ada} (reduced); lane 11: HC_{Ada}-Z06814 (reduced) and lane 12: LC_{Ada}-Z06814 (reduced).

[0207] FIG. 10 shows the inhibition of TF-1 cell proliferation assayed as described in Example 11 and using constructs and comparators as indicated. A) TF-1 cells stimulated with IL-6, B) TF-1 cells stimulated with TNF, C) TF-1 cells stimulated with both IL-6 and TNF.

[0208] FIG. 11 shows the in vivo efficacy of Z06814-HC_{Ada} (squares) in comparison to Ada (filled circles) in an anti-arthritic mouse model assaying IL-6 triggered serum amyloid-A (SAA) protein release as described in Example 12. Z06814-HC_{Ada} and Ada were injected at doses of 0.7, 7 and 70 mg/kg.

[0209] FIG. 12 shows the SDS-PAGE analysis of purified complexes described in Example 13. A) Non-reduced conditions. B) Reduced conditions. Lane M: Molecular weight standard; lane 1: trastuzumab (control IgG); lane 2: adalimumab (control IgG); lane 3: LC_{Ada}-GGGGS-Z14976; lane 4: Z14976-(GGGGS)-LC_{Ada}; lane 5: Z14976-(GGGGS)₃-LC_{Ada}. The arrows in B) indicate the light chains fused to Z14976.

[0210] FIG. 13 shows binding of the indicated complexes to A) TNF and B) IL-6 analyzed by ELISA as described in Example 13. The TNF-binding antibody adalimumab and a non-relevant IgG were included as controls in both assays.

### EXAMPLES

### Summary

[0211] In inflammatory rheumatic diseases, competitive blocking of IL-6 induced effects has shown to be highly effective. Similarly, the high affinity anti-human TNF monoclonal antibody adalimumab is used clinically for treatment of TNF-induced inflammation indications, including rheumatoid arthritis. To investigate if these two anti-inflammatory effects could be combined in one molecule, different fusion molecules based on an IL-6 targeting Z variant and an antibody, “Ada”, having the same binding specificity as the TNF targeting antibody adalimumab, were designed, produced and characterized in vitro and in vivo, as described in the following Examples.

[0212] Examples 1-8 disclose the development of novel Z variant molecules targeting interleukin 6 (IL-6). The Z variants were obtained using phage display technology using a phage library of Z variants, a first maturated library of IL-6 binding Z variants and a second maturated library of IL-6 binding Z variants as described below. The genes encoding IL-6 binding polypeptides described herein were sequenced and the corresponding amino acid sequences are listed in FIG. 1 and are denoted by the identifiers SEQ ID NO: 1-1551. Said IL-6 binding polypeptides were produced and characterized in vitro and in vivo.

[0213] Examples 9-13 disclose fusion of selected IL-6 binding Z variants to an anti-TNF monoclonal antibody in order to study the inflammation blocking effects of a complex comprising an IL-6 binding polypeptide and said antibody within the same molecule. Fusions based on an IL-6 targeting Z variant and the TNF targeting monoclonal antibody were designed, produced and characterized in vitro and in vivo.

### Example 1

### Selection and ELISA Screening of IL-6 Binding Z Variants

[0214] In this Example, human (hIL-6) and murine IL-6 (mIL-6) were used as target proteins in phage display selections using a phage library of Z variants. The DNA of selected clones was sequenced and the clones were produced in E. coli periplasmic fractions and assayed against IL-6 in ELISA (enzyme-linked immunosorbent assay).

### Materials and Methods

[0215] Biotinylation of the Target Proteins Human and Murine IL-6:

[0216] hIL-6 and mIL-6 (Peprotech, cat. no. 200-06 and 216-16, respectively) were biotinylated using No-Weigh EZ-Link Sulfo-NHS-LC-Biotin (Thermo Scientific, cat. no. 21327) at a 12× molar excess according to the manufacturer's recommendations. The reactions were performed at room temperature (RT) for 30 min. Next, buffer exchange to phosphate buffered saline (PBS, 10 mM phosphate, 137 mM NaCl, 2.68 mM KCl, pH 7.4) was performed using Slide-a-lyzer dialysis cassettes (Thermo Scientific, cat. no. 66333, 3,500 MWCO) according to the manufacturer's instructions.

[0217] Phage Display Selection of IL-6 Binding Z Variants:

[0218] A library of random variants of protein Z displayed on bacteriophage, constructed in phagemid pAY02592 essentially as described in Grönwall et al. (2007) J Biotechnol, 128:162-183, was used to select IL-6 binding Z variants. In this library, an albumin binding domain (abbreviated ABD and corresponding to GA3 of protein G from Streptococcus strain G148) was used as fusion partner to the Z variants. The library is denoted Zlib006Naive.II and has a size of 1.5×10¹⁰ library members (Z variants). E. coli RRIΔM15 cells (Rüther et al., (1982) Nucleic Acids Res 10:5765-5772) from a glycerol stock containing the phagemid library Zlib006Naive.II were inoculated in 20 l of a defined proline free medium [7 g/l dipotassium hydrogenphosphate, 1 g/l trisodium citrate dihydrate, 0.02 g/l uracil, 6.7 g/l YNB (Difco™ Yeast Nitrogen Base w/o amino acids, Becton Dickinson), 5.5 g/l glucose monohydrate, 0.3 g/l L-alanine, 0.24 g/l L-arginine monohydrochloride, 0.11 g/l L-asparagine monohydrate, 0.1 g/l L-cysteine, 0.3 g/l L-glutamic acid, 0.1 g/l L-glutamine, 0.2 g/l glycine, 0.05 g/l L-histidine, 0.1 g/l L-isoleucine, 0.1 g/l L-leucine, 0.25 g/l L-lysine monohydrochloride, 0.1 g/l L-methionine, 0.2 g/l L-phenylalanine, 0.3 g/l L-serine, 0.2 g/l L-threonine, 0.1 g/l L-tryptophane, 0.05 g/l L-tyrosine, 0.1 g/l L-valine], supplemented with 100 μg/ml ampicillin. The cultivations were grown at 37° C. in a fermenter (Belach Bioteknik, BR20). When the cells reached an optical density at 600 nm (OD₆₀₀) of 0.75, approximately 2.6 l of the cultivation was infected using a 10× molar excess of M13K07 helper phage (New England Biolabs, cat. no. N03155). The cells were incubated for 30 min, whereupon the fermenter was filled up to 20 l with TSB-YE (Tryptic Soy Broth-Yeast Extract; 30 g/l TSB, 5 g/l yeast extract) supplemented with 100 μM isopropyl-β-D-1-thiogalactopyranoside (IPTG) for induction of expression and with 25 μg/ml kanamycin and 12.5 μg/ml carbenicillin. Cells were grown at 30° C. for 22 h and the cells in the cultivation were pelleted by centrifugation at 15,900 g. Phage particles were precipitated from the supernatant twice in PEG/NaCl (polyethylene glycol/sodium chloride), filtered and dissolved in PBS and glycerol as described in Grönwall et al., supra. Phage stocks were stored at −80° C. before use.

[0219] Selection procedure and phage stock preparation were performed essentially as described for selection against another biotinylated target in WO2009/077175. In order to reduce the amount of background binders, pre-selection was performed by incubation of phage stock with SA-beads for 30 min at RT. All tubes and beads used in the selection were pre-blocked with PBS supplemented with 5% BSA. Selection was performed in PBS supplemented with 3% BSA and 0.1% Tween20 during 2 h at RT, followed by capture of target-bound phage on Dynabeads® M-280 Streptavidin (SA-beads, Invitrogen, cat. no. 11206D) using 1 mg beads per 1.6 μg biotinylated hIL-6 or mIL-6. E. coli strain XL1-Blue (Agilent technologies, cat. no. 200268) was used for phage amplification.

[0220] Selections against biotinylated hIL-6 and mIL-6 were performed in four cycles divided in four different final tracks: track (1) in cycle 1 was divided either in the second cycle or the fourth cycle, resulting in totally three tracks (1-1 to 1-3) in cycle 2, three tracks (1-1-1 to 1-3-1) in cycle 3 and four tracks (1-1-1-1 to 1-3-1-2) in cycle 4. After washes, bound phage were eluted from the selection tracks using 500 μl 0.1 M glycine-HCl, pH 2.2, followed by immediate neutralization with 50 μl 1 M Tris-HCl, pH 8.0, and 450 μl PBS. An overview of the selection strategy and parameters used, describing the differences in the selection tracks in terms of lowered target concentration and increased number of washes, is shown in Table 2.

TABLE 2
Overview of the strategy for primary selection

| | | Phage stock | | | |
|---|---|---|---|---|---|
| | | from library or | | Target | Number |
| | Selection | selection | | concentration | of |
| Cycle | track | track | Target | (nM) | washes |
| 1 | 1 | Zlib006Naive.II | hIL-6 | 100 | 2 |
| 2 | 1-1 | 1 | hIL-6 | 50 | 5 |
| 2 | 1-2 | 1 | hIL-6 | 10 | 5 |
| 2 | 1-3 | 1 | mIL-6 | 100 | 4 |
| 3 | 1-1-1 | 1-1 | hIL-6 | 25 | 6 |
| 3 | 1-2-1 | 1-2 | hIL-6 | 2 | 8 |
| 3 | 1-3-1 | 1-3 | hIL-6 | 25 | 6 |
| 4 | 1-1-1-1 | 1-1-1 | hIL-6 | 10 | 8 |
| 4 | 1-2-1-1 | 1-2-1 | hIL-6 | 0.5 | 12 |
| 4 | 1-3-1-1 | 1-3-1 | mIL-6 | 10 | 8 |
| 4 | 1-3-1-2 | 1-3-1 | hIL-6 | 0.5 | 12 |

[0221] Sequencing:

[0222] PCR fragments were amplified from single colonies using a standard PCR program and the primers AFFI-21 (5′-tgcttccggctcgtatgttgtgtg; SEQ ID NO:1560) and AFFI-22 (5′-cggaaccagagccaccaccgg; SEQ ID NO:1561). Sequencing of amplified fragments was performed using the biotinylated oligonucleotide AFFI-72 (5′-biotin-cggaaccagagccaccaccgg; SEQ ID NO:1562) and a BigDye® Terminator v3.1 Cycle Sequencing Kit (Applied Biosystems), used in accordance with the manufacturer's recommendations. The sequencing reactions were purified by binding to magnetic streptavidin coated beads (Detach Streptavidin Beads, Nordiag, cat. no. 2012-01) using a Magnatrix 8000 (Magnetic Biosolution) instrument and analyzed on an ABI PRISM® 3130xl Genetic Analyzer (PE Applied Biosystems).

[0223] Production of Z Variants for ELISA:

[0224] Sequenced Z variants were produced by inoculating single colonies from the selections in 1 ml TSB-YE medium supplemented with 100 μg/ml ampicillin and 0.1 mM IPTG in deep-well plates (Nunc, cat. no. 278752). The plates were incubated for 24 h at 37° C. Cells were pelleted by centrifugation, re-suspended in 200 μl PBST 0.05% (PBS supplemented with 0.05% Tween-20), frozen at −80° C. and thawed in a water bath to release the periplasmic fraction of the cells. The freeze-thawing procedure was repeated five times. The samples were diluted with PBST 0.05% to a total of 800 μl and cells were pelleted by centrifugation. The supernatant of the periplasmic extract contained the Z variants as fusions to ABD, expressed as AQHDEALE-[Z#####]-VDYV-[ABD]-YVPG (Grönwall et al., supra). Z##### refers to individual, 58 amino acid residue Z variants.

[0225] ELISA Analysis of Z Variants:

[0226] The binding of Z variants to IL-6 was analyzed in an ELISA assay. Half-area 96-well ELISA plates (Costar, cat. no. 3690) were coated at 4° C. overnight with 2 μg/ml of an anti-ABD goat antibody (produced in-house) diluted in coating buffer (50 mM sodium carbonate, pH 9.6; Sigma, cat. no. C3041). The antibody solution was poured off and the wells were blocked with 100 μl of PBSC (PBS supplemented with 0.5% casein; Sigma, cat. no. C8654) for 1.5 h at RT. The blocking solution was discarded and 50 μl periplasmic solution was added to the wells and incubated for 1.5 h at RT under slow shaking. The supernatants were poured off and the wells were washed 4 times with PBST 0.05%. Next, 50 μl of biotinylated hIL-6 at a concentration of 7.7 nM in PBSC was added to each well. The plates were incubated for 1.5 h at RT followed by washes as described above. Streptavidin conjugated HRP (Thermo Scientific, cat. no. N100) was diluted 1:30 000 in PBSC and added to the wells followed by 45 min incubation. After washing as described above, 50 μl ImmunoPure TMB substrate (Thermo Scientific, cat. no. 34021) was added to the wells and the plates were treated according to the manufacturer's recommendations. A Z variant binding a specific irrelevant protein was used as a positive control by assaying against that specific irrelevant protein, and as a negative control by assaying against hIL-6. As blank control, PBST 0.05% was added instead of the periplasmic sample. Absorbance was measured at 450 nm using a multi-well plate reader (Victor³, Perkin Elmer).

### Results

[0227] Phage Display Selection of IL-6 Binding Z Variants:

[0228] Individual clones were prepared after four cycles of phage display selections against biotinylated hIL-6 and mIL-6.

[0229] Sequencing:

[0230] Sequencing was performed for clones picked at random from selection round four. Each Z variant was given a unique identification number #####, and individual variants are referred to as Z#####. The amino acid sequences of 58 residues long Z variants are listed in FIG. 1 and in the sequence listing as SEQ ID NO:1503-1551. The deduced IL-6 binding motifs (BM) extend from position 8 to position 36 in each sequence. The amino acid sequences of the 49 amino acid residues long polypeptides predicted to constitute the complete three-helix bundle within each of these Z variants (BMod) extend from position 7 to position 55.

[0231] ELISA Analysis of Z Variants:

[0232] The clones obtained after four cycles of selection were produced in 96-well plates and screened for hIL-6 binding activity in ELISA. All clones giving a response with signals corresponding to at least 3× the negative control were considered as positive IL-6 binders. The control molecule specific for an irrelevant protein gave a positive signal for the specific protein, whereas no signal was obtained against hIL-6.

### Example 2

### Production and In Vitro Characterization of IL-6 Binding Z Variants

[0233] In this Example, a subset of Z variants were subcloned, produced and functionally assessed in competition ELISAs and cell assays. Two different ELISA assays were applied to investigate if the IL-6 binding Z variants were able to block the specific interaction between IL-6 and IL-6Rα or between IL-6 and the gp130 receptor, respectively. The potency of the Z variant polypeptides was assessed using two different cell assays, mimicking the classical cis-signaling pathway and trans-signaling pathway, respectively. Finally, circular dichroism (CD) spectroscopy was performed for a subset of the Z variants in order to investigate their secondary structure and determine their melting temperatures, Tm.

### Materials and Methods

[0234] Subcloning of Z Variants:

[0235] The DNA of 13 IL-6 binding Z variants, Z06777 (SEQ ID NO:1503), Z06779 (SEQ ID NO:1504), Z06789 (SEQ ID NO:1505), Z06791 (SEQ ID NO:1506), Z06792 (SEQ ID NO:1507), Z06799 (SEQ ID NO:1508), Z06802 (SEQ ID NO:1509), Z06805 (SEQ ID NO:1510), Z06809 (SEQ ID NO:1511), Z06814 (SEQ ID NO:1512), Z06829 (SEQ ID NO:1513), Z06834 (SEQ ID NO:1514), Z06844 (SEQ ID NO:1515) was amplified from the library vector pAY02592. A subcloning strategy for construction of monomeric Z variant molecules with an N-terminal His₆ tag was applied using standard molecular biology techniques (essentially as described in WO2009/077175 for Z variants binding another target). The Z gene fragments were subcloned into the expression vector pAY01448 resulting in the encoded sequence MGSSHHHHHHLQ-[Z#####]-VD.

[0236] A subset of five IL-6 binding Z variants, Z06789, Z06799, Z06809, Z06814 and Z06829, and two control Z variants binding an irrelevant target, Z03638 (SEQ ID NO:1552) and Z04726 (SEQ ID NO:1553), were subcloned in fusion with the ABD variant PP013 (SEQ ID NO:1554). The constructs encoded by the expression vectors were MGSSLQ-[Z#####]-VDGS-PP013.

[0237] Cultivation and Purification:

[0238] E. coli BL21(DE3) cells (Novagen) were transformed with plasmids containing the gene fragment of each respective IL-6 binding Z variant and cultivated at 37° C. in 800 or 1000 ml of TSB-YE medium supplemented with 50 μg/ml kanamycin. In order to induce protein expression, IPTG was added to a final concentration of 0.2 mM at OD₆₀₀=2 and the cultivation was incubated at 37° C. for another 5 h. The cells were harvested by centrifugation.

[0239] Purification of IL-6 Binding Z Variants with a His₆-Tag:

[0240] Protein purification was performed under either native or denatured conditions.

[0241] The purification under native conditions was performed as follows: Approximately 2-5 g of each cell pellet was resuspended in 10 ml PBS. After cell disruption by sonication, cell debris was removed by centrifugation and each supernatant was applied on 2 ml Talon cobolt columns (Clontech, cat. no. 635504) equilibrated with 20 ml wash buffer (46.6 mM Na₂HPO₄, 3.4 mM NaH₂PO₄, and 300 mM NaCl, pH 7.0). Contaminants were removed by washing with wash buffer, and the IL-6 binding Z variants were subsequently eluted with elution buffer (50 mM NaH₂PO₄, 100 mM NaCl, 30 mM HAc and 70 mM NaAc, pH 5.0).

[0242] The purification under denatured conditions was performed as follows: Approximately 2-5 g of each cell pellet was resuspended in 10 ml lysis buffer (7 M guanidinium hydrochloride, 47 mM Na₂HPO₄, 2.65 mM NaH₂PO₄, 10 mM Tris-HCl, 104 mM NaCl, pH 8.0) followed by incubation at 37° C., 150 rpm for 2 h. The washing and elution steps were performed as for the native purification but using different buffers (wash buffer: 6 M guanidinium hydrochloride, 47 mM Na₂HPO₄, 3.4 mM NaH₂PO₄, 300 mM NaCl, pH 8.0; elution buffer: 6 M urea, 0.1 M NaCl, 29.6 mM HAc, 70.4 mM NaAc and 50 mM NaH₂PO₄, pH 5.0). Purified Z variants were buffer exchanged to PBS using PD-10 columns (GE Healthcare) according to the manufacturer's protocol.

[0243] Protein concentrations were determined by measuring the absorbance at 280 nm, using the extinction coefficient of the respective protein. The purity of the IL-6 binding Z variants was analyzed by SDS-PAGE stained with Coomassie Blue.

[0244] Purification of IL-6 Binding Z Variants in Fusion with ABD:

[0245] Approximately 2.5 g of each cell pellet was re-suspended in 20 ml TST-buffer (25 mM Tris-HCl, 1 mM EDTA, 200 mM NaCl, 0.05% Tween20, pH 8.0) supplemented with Benzonase® (Merck). After cell disruption by sonication and clarification by centrifugation, each supernatant was applied on a gravity flow column with 1 ml anti-ABD agarose (WO2014/064237). After washing with TST-buffer and 5 mM NH₄Ac pH 5.5 buffer, the ABD fused Z variants were eluted with 0.1 M HAc. Buffer exchange to PBS (2.68 mM KCl, 137 mM NaCl, 1.47 mM KH₂PO₄, 8.1 mM Na₂HPO₄, pH 7.4) was performed using PD-10 columns (GE Healthcare). Next, the ABD fused Z variants were purified on 1 ml Detoxi-Gel Endotoxin Removing Columns (Pierce, cat.no. 20344) to ensure low endotoxin content. Protein concentrations were determined by measuring the absorbance at 280 nm, using the extinction coefficient of the respective protein. The purity was analyzed by SDS-PAGE stained with Coomassie Blue and the identity of each purified Z-ABD variant was confirmed using LC/MS analysis.

[0246] Analysis of Binding Site:

[0247] A first assay was employed to evaluate the interference of the IL-6 binding Z variants with the interaction between hIL-6 and the human IL-6Rα (hIL-6Rα). In this experiment, half area 96-well ELISA plates were coated with anti-IL-6R capture antibody (R&D Systems) at a concentration of 2 μg/ml. Plates were incubated overnight at 4° C. and then washed twice in tap water. Next, the plates were blocked for 1 h in PBSC, and hIL-6Rα (R&D Systems) was added at a concentration of 250 ng/ml. Plates were incubated for 1.5 h at RT and then washed 4 times with 200 μl 0.05% Tween/PBS. In separate plates, serial dilutions (concentration range 500-0.5 nM) of the 13 His₆-tagged Z variant polypeptides were titrated with 2.5 nM of biotinylated hIL-6. The IL-6Rα antibody tocilizumab (Roche) was prepared in the same way and included for comparison. Each pre-mixture of Z variant with biotinylated hIL-6 was then transferred to wells containing hIL-6Rα. Plates were incubated for another 1.5 h and then washed four times. A 1:8000 dilution of streptavidin-HRP (Thermo Scientific) was added and the plates were incubated for 1 h. Plates were washed a final four times with 0.05% Tween/PBS and TMB substrate (Thermo Scientific) was added for 15 min before the reaction was stopped with 2 M H₂SO₄. The absorbance was measured at 450 nm using a microplate reader (Victor³, Perkin Elmer).

[0248] A second assay was employed to evaluate the interference of the IL-6 binding Z variants on the interaction between human gp130 (hgp130) and pre-mixed hIL-6/hIL-6Rα. In this experiment, half area 96-well ELISA plates were coated with Fc-fused hgp130 (hgp130-Fc) at a concentration of 4 μg/ml. Plates were incubated overnight at 4° C. and then washed twice in tap water. Next, the plates were blocked for 1 h in PBSC. Plates were incubated for 1.5 h at RT and then washed 4 times with 200 μl 0.05% Tween/PBS. In separate plates, serial dilutions (concentration range 500-0.5 nM) of the 13 His₆-tagged Z variant polypeptides were titrated with fixed concentration of hIL-6/hIL-6Rα (0.5 nM and 5 nM, respectively).

[0249] The IL-6Rα binding antibody tocilizumab (Roche) was prepared in the same way and included for comparison. The pre-mixed association of each Z variant polypeptide with hIL-6/hIL-6Rα was then transferred to wells containing hgp130. Plates were incubated for 1.5 h and then washed 4 times. A biotinylated anti-IL-6Rα antibody (R&D Systems) was added and the plates were incubated for another 1.5 h followed by washing. A 1:8000 dilution of streptavidin-HRP (Thermo Scientific) was added and the plates were incubated for 1 h. Next, plates were washed four times and TMB substrate (Thermo Scientific) was added for 15 min before the reaction was stopped with 2 M H₂SO₄. The absorbance was measured at 450 nm using a microplate reader (Victor³, Perkin Elmer).

[0250] In Vitro Neutralization Assays:

[0251] A first assay, evaluating the classical signaling pathway, used the TF-1 cell line that proliferates in response to human IL-6, TNF and GM-CSF. TF-1 cells were cultured in RPMI1640 with L-glut (Lonza) supplemented with 10% FCS (Gibco), Pen-Strep (Lonza) and 2 ng/ml rhGM-CSF (R&D Systems). Prior to use, cells were washed twice in RPMI1640 in the absence of rhGM-CSF. Cells were then counted and dispensed into 96 well flat bottomed plates at a density of 4×10⁴ cells per well. In separate plates, serial dilutions of the inhibitory compounds (IL-6 binding Z variants, with a His₆-tag (concentration range 1000-0.1 nM) or in fusion with the ABD variant PP013 (SEQ ID NO:1554; concentration range 200-0.007 nM)), and the IL-6Rα binding antibody tocilizumab (Roche; concentration range 200-0.007 nM) were incubated in the presence of 0.099 nM rhIL-6 (R&D Systems, UK). In addition, the ABD-fused variants were incubated with or without 9 μM rhHSA (Novozymes). The pre-mixtures of the Z variant polypeptides and hIL-6 were then transferred to wells containing TF-1 cells which were incubated for 72 h at 37° C. in a humidified 5% CO₂ atmosphere. During the last four hours of incubation 10 μl of CCK-8 (Fluka, Sigma Aldrich) was added per well to determine the number of proliferating cells. The absorbance was measured at 450 nm (Abs450) using a microplate reader (Victor³, Perkin Elmer). The data on cell growth was assessed by non-linear regression to a four-parameter dose-response curve, and the half maximal inhibitory concentration (IC50) was determined using GraphPadPrism program. The inhibition of IL-6-dependent proliferation of TF-1 cells by the inhibitory molecules was as Abs450 minus control wells that contained cells but no hIL-6.

[0252] To address the trans-signaling pathway, a second assay was used. Herein, human umbilical vein endothelial cells (HUVECs) were stimulated with hIL-6 and soluble hIL-6Rα and the readout was the production of monocyte chemoattractant protein-1 (MCP-1). HUVECs (Lonza) were grown in EGM-2 bullet kit media (Lonza) and passaged in culture no more than eight times. Cells were grown until 75% confluence before use. Cells were detached using trypsin/EDTA (Lonza), resuspended and washed once in fresh medium. Next, cells were counted and dispensed into 96 well flat bottom plates at a density of 2×10⁴ cells per well. Cells were cultured overnight at 37° C. in a humidified 5% CO₂ atmosphere. In separate plates, serial dilutions (100-0.0015 nM) of the IL-6 binding Z variants Z06789, Z06799, Z06809, Z06814 and Z06829 in fusion with the ABD variant PP013 (SEQ ID NO:1554), PP013-fused negative control Z03638 (SEQ ID NO:1552) binding a different target, and serial dilutions (200-0.003 nM) of tocilizumab (Roche) were incubated in the presence of recombinant hIL-6 (10 ng/ml; 0.5 nM) and soluble hIL-6Rα at a fixed concentration of 200 ng/ml (5.6 nM) with or without 9 μM rhHSA (Novozymes). The pre-mixed solutions with the test molecules and hIL-6/hIL-6Rα were then transferred to wells containing HUVECs, which were incubated for 24 h at 37° C. in a humidified 5% CO₂ atmosphere. Cell free supernatant was collected after the incubation period and human MCP-1 levels were determined by sandwich ELISA using the MCP-1 Duoset ELISA development system (R&D Systems).

[0253] MCP-1 ELISA:

[0254] Half area 96-well ELISA plates were coated with anti-MCP-1 capture antibody (R&D Systems) at a concentration of 1 μg/ml. Plates were incubated overnight at 4° C., washed twice in tap water and blocked for 1 h in PBSC. Plates were then washed four times with 4×200 μl 0.05% Tween/PBS before standards and samples were added. Plates were incubated for 2 h at RT and washed before addition of 0.1 μg/ml biotinylated anti-MCP-1 antibody (R&D Systems). Plates were then incubated for another 1.5 h, then washed four times. Next, a 1:8000 dilution of streptavidin-HRP (Thermo Scientific) was added and the plates were incubated for 1 h. The plates were washed a final four times and TMB substrate (Thermo Scientific) was added for 20 min before the reaction was stopped with 2 M H₂SO₄. The absorbance was measured at 450 nm using a microplate reader (Victor³, Perkin Elmer).

[0255] CD Analysis:

[0256] A subset of the purified His₆-tagged Z variants was diluted to 0.5 mg/ml in PBS. For each diluted Z variant, a CD spectrum at 250-195 nm was obtained at 20° C. In addition, a variable temperature measurement (VTM) was performed to determine the melting temperature (Tm). In the VTM, the absorbance was measured at 221 nm while the temperature was raised from 20 to 90° C., with a temperature slope of 5° C./min. The CD measurements were performed on a Jasco J-810 spectropolarimeter (Jasco Scandinavia AB) using a cell with an optical path-length of 1 mm.

### Results

[0257] Cultivation and Purification:

[0258] The 13 IL-6 binding Z variants (SEQ ID NO:1503-1515), constructed with an N-terminal His₆ tag, were produced in E. coli. The amount of IMAC-purified protein from approximately 2-5 g bacterial pellets, determined spectrophotometrically by measuring the absorbance at 280 nm, ranged from approximately 10 mg to 20 mg for the different IL-6 binding Z variants. 2 mg to 12 mg were obtained from approximately 2.5 g bacterial pellet of the five Z variants fused to the ABD variant PP013 (SEQ ID NO:1554). SDS-PAGE analysis of each final protein preparation showed that these predominantly contained the IL-6 binding Z variant. The correct identity and molecular weight of each IL-6 binding Z variant was confirmed by HPLC-MS analysis.

[0259] Analysis of Binding Site:

[0260] The ability of the 13 tested IL-6 binding His₆-tagged Z variants to block the interactions between either (i) hIL-6 and hIL-6Rα or (ii) hgp130 and preformed hIL-6/hIL-6Rα was investigated in two separate competitive ELISA experiments. None of the 13 Z variants showed any significant effect when tested for blocking of the hIL-6/hIL-6Rα interaction (FIG. 2). However, all Z variants showed a clear concentration-dependent blocking of the interaction between pre-formed hIL-6/hIL-6Rα and hgp130, i.e. the trans-signaling-resembling interaction (FIG. 3). The calculated IC50 value for each Z variant is shown in Table 3. The antibody tocilizumab, included for comparison, showed a blocking effect in both experiments.

TABLE 3
IC50 values for primary Z variants blocking the hIL-6/hIL-6Rα
interaction with hgp130

| | SEQ ID NO of | |
|---|---|---|
| Z variant | Z variant: | IC50 (M) |
| His₆-Z06777 | 1503 | 4.6 × 10⁻⁸ |
| His₆-Z06779 | 1504 | 3.6 × 10⁻⁸ |
| His₆-Z06789 | 1505 | 6.2 × 10⁻⁹ |
| His₆-Z06791 | 1506 | 2.3 × 10⁻⁸ |
| His₆-Z06792 | 1507 | 1.7 × 10⁻⁸ |
| His₆-Z06799 | 1508 | 3.7 × 10⁻⁹ |
| His₆-Z06802 | 1509 | 2.7 × 10⁻⁸ |
| His₆-Z06805 | 1510 | 4.2 × 10⁻⁸ |
| His₆-Z06809 | 1511 | 3.3 × 10⁻⁹ |
| His₆-Z06814 | 1512 | 1.6 × 10⁻⁹ |
| His₆-Z06829 | 1513 | 1.1 × 10⁻⁸ |
| His₆-Z06834 | 1514 | 5.3 × 10⁻⁸ |
| His₆-Z06844 | 1515 | 8.7 × 10⁻⁸ |

[0261] In Vitro Neutralization Assays:

[0262] Two different cell assays were used for investigating the ability of the IL-6 binding Z variants to block IL-6 dependent signaling in the classical signaling pathway and the trans-signaling pathway, respectively. The first assay, evaluating the classical signaling pathway, employed the TF-1 cell line that proliferates in response to human IL-6, TNF and GM-CSF. The direct signaling of IL-6 to cell surface IL-6 receptor, in conjunction with a signaling receptor sub-unit called gp130, is termed cis-signaling. This assay showed that all 13 variants were capable of blocking IL-6 dependent growth of the TF-1 cells. The calculated IC50 values for His₆-tagged Z variants and Z variants recombinantly fused to the ABD variant PP013 (SEQ ID NO:1554), as well as for the hIL-6Rα binding antibody tocilizumab included for comparison, are shown in Table 4.

TABLE 4
IC50 values for primary Z variants blocking the IL-6 dependent
growth of TF-1 cells

| | SEQ ID NO of | |
|---|---|---|
| Z variant | Z variant: | IC50 (M) |
| His₆-Z06777 | 1503 | 7.2 × 10⁻⁸ |
| His₆-Z06779 | 1504 | 3.0 × 10⁻⁸ |
| His₆-Z06789 | 1505 | 8.6 × 10⁻⁹ |
| His₆-Z06791 | 1506 | 5.2 × 10⁻⁹ |
| His₆-Z06792 | 1507 | 5.3 × 10⁻⁸ |
| His₆-Z06799 | 1508 | 3.9 × 10⁻⁹ |
| His₆-Z06802 | 1509 | 4.3 × 10⁻⁸ |
| His₆-Z06805 | 1510 | 7.7 × 10⁻⁸ |
| His₆-Z06809 | 1511 | 2.0 × 10⁻⁸ |
| His₆-Z06814 | 1512 | 1.6 × 10⁻⁹ |
| His₆-Z06829 | 1513 | 2.8 × 10⁻⁸ |
| His₆-Z06834 | 1514 | 6.1 × 10⁻⁸ |
| His₆-Z06844 | 1515 | 1.1 × 10⁻⁷ |
| Z06789-ABD | 1505 | ~1 × 10⁻⁷ |
| Z06799-ABD | 1508 | 2.4 × 10⁻⁹ |
| Z06809-ABD | 1511 | 1.0 × 10⁻⁸ |
| Z06814-ABD | 1512 | 8.0 × 10⁻¹⁰ |
| Z06829-ABD | 1513 | 1.5 × 10⁻⁸ |
| tocilizumab | | 3.0 × 10⁻¹⁰ |

[0263] To investigate if also the trans-signaling pathway could be blocked in a cell based system, a second assay using gp130 expressing human umbilical vein endothelial cells (HUVECs) was performed. Incubation of HUVECs with preformed hIL-6/hIL-6Rα results in IL-6 trans-signaling dependent secretion of Monocyte Chemoattractant Protein-1 (MCP-1), allowing for analysis of any trans-signaling blocking capabilities of IL-6 binding Z variants. In this assay, five Z variants recombinantly fused to the ABD variant PP013 (SEQ ID NO:1554) were analyzed in the presence of HSA. The hIL-6Rα binding antibody tocilizumab was included for comparison. All five investigated Z variants were shown to inhibit trans-signaling (FIG. 4). One variant, Z06814-ABD, was shown to be more potent than tocilizumab and exhibited an approximate IC50 value of 1 nM compared to 5 nM for tocilizumab.

[0264] CD Analysis:

[0265] The CD spectra determined for seven Z variants showed that each had an α-helical structure at 20° C. The melting temperatures (Tm) determined through variable temperature measurements are shown in Table 5.

TABLE 5
Melting temperatures for a selection of Z variants

| Z variant | SEQ ID NO: | Tm (° C.) |
|---|---|---|
| His₆-Z06779 | 1504 | 51 |
| His₆-Z06789 | 1505 | 52 |
| His₆-Z06792 | 1507 | 48 |
| His₆-Z06799 | 1508 | 44 |
| His₆-Z06809 | 1511 | 51 |
| His₆-Z06814 | 1512 | 49 |
| His₆-Z06829 | 1513 | 40 |

### Example 3

### Design and Construction of a First Maturated Library of IL-6 Binding Z Variants

[0266] In this Example, a maturated library was constructed. The library was used for selections of new IL-6 binding Z variants. Selections from maturated libraries are usually expected to result in binders with increased affinity (Orlova et al., (2006) Cancer Res 66(8):4339-48). In this study randomized single stranded linkers were generated, using split-pool synthesis, enabling incorporation of defined codons in desired positions in the synthesis.

### Materials and Methods

[0267] Library Design:

[0268] The library was based on a selection of sequences of the IL-6 binding Z variants described in Example 1 and 2. In the new library, 12 variable positions in the Z molecule scaffold were biased towards certain amino acid residues and one position was kept constant, according to a strategy based on the Z variant sequences defined in SEQ ID NO:1503-1551. Using split-pool synthesis, a DNA linker of 147 bp was generated, encoding a partially randomized helix 1 and 2 of the Z variant amino acid sequence. Thus, 5′-AA ATA AAT CTC GAG GTA GAT GCC AAA TAO GCC AAA GAA NNN NNN NNN GCG TGG NNN GAG ATC NNN NNN CTG CCT AAC CTC ACC NNN NNN CAA NNN NNN GCC TTC ATC NNN AAA TTA NNN GAT GAO CCA AGC CAG AGC TCA TTA TTT A-3′ (SEQ ID NO:1563; randomized codons denoted NNN) flanked by restriction sites XhoI and SacI, was ordered from DNA 2.0 (Menlo Park, Calif., USA). The theoretical distributions of amino acid residues in the new library including 12 variable Z positions (9, 10, 11, 14, 17, 18, 24, 25, 27, 28, 32 and 35) in the Z molecule scaffold are given in Table 6. The resulting theoretical library size is 3.6×10⁹ variants.

TABLE 6
Library design, first maturation

| | | No of | |
|---|---|---|---|
| Amino acid | Randomization (amino acid | amino | |
| position in Z | abbreviations) | acids | Proportion |
| 9 | E (70%), H, Q, T, | 4 | 1/10, 7/10 |
| | | | (E) |
| 10 | A, H, Q, R, | 4 | 1/4 |
| 11 | A, D, E, H, K, Q, R, S, T, V | 10 | 1/10 |
| 13 | W | 1 | 1/1 |
| 14 | A, F, H, L, R, S, T, W, Y | 9 | 1/9 |
| 17 | H (70%), Q, S, T | 4 | 1/10, 7/10 |
| | | | (H) |
| 18 | A, H, I, K, L, M, S, T, V | 9 | 1/9 |
| 24 | A, H, I, T, V | 5 | 1/5 |
| 25 | D, E, H, N, Q, R, S, T | 8 | 1/8 |
| 27 | A, H, I, L, M, R, T, V | 8 | 1/8 |
| 28 | A, E, H, S, T, V | 6 | 1/6 |
| 32 | A, H, I, M, Q, S, T, V, W | 9 | 1/9 |
| 35 | F, L, M, Y | 4 | 1/4 |

[0269] Library Construction:

[0270] The library was amplified using AmpliTaq Gold polymerase (Applied Biosystems, cat. no. 4311816) during 12 cycles of PCR and pooled products were purified with QIAquick PCR Purification Kit (QIAGEN, cat. no. 28106) according to the supplier's recommendations. The purified pool of randomized library fragments was digested with restriction enzymes XhoI and SacI-HF (New England Biolabs, cat. no. R0146L, and cat. no. R3156M) and concentrated using a PCR Purification Kit (QIAGEN, cat. no. 28106). Subsequently, the product was run on a preparative 2.5 agarose gel (Nuisieve GTC agarose, Cambrex, Invitrogen) and purified using a QIAGEN gel extraction Kit (QIAGEN, cat. no. 28706) according to the supplier's recommendations.

[0271] The phagemid vector pAY02592 (essentially as pAffi1 described in Grönwall et al supra) was restricted with the same enzymes and purified using phenol/chloroform extraction and ethanol precipitation. The restricted fragments and vector were ligated in a molar ratio of 5:1 with T4 DNA ligase (Fermentas, cat. no. EL0011) for 2 h at RT, followed by overnight incubation at 4° C. The ligated DNA was recovered by phenol/chloroform extraction and ethanol precipitation, followed by dissolution in 10 mM Tris-HCl, pH 8.5. Thus, the resulting library in vector pAY02592 encoded Z variants, each fused to an albumin binding domain (ABD) derived from streptococcal protein G.

[0272] The ligation reactions (approximately 160 ng DNA/transformation) were electroporated into electrocompetent E. coli ER2738 cells (50 μl, Lucigen, Middleton, Wis., USA). Immediately after electroporation, approximately 1 ml of recovery medium (supplied with the ER2738 cells) was added. The transformed cells were incubated at 37° C. for 60 min. Samples were taken for titration and for determination of the number of transformants. Next, the cells were pooled and cultivated overnight at 37° C. in 1 l of TSB-YE medium, supplemented with 2% glucose, 10 μg/ml tetracycline and 100 μg/ml ampicillin. The cells were pelleted for 7 min at 4,000 g and resuspended in a PBS/glycerol solution (approximately 40% glycerol), aliquoted and stored at −80° C. Clones from the library of Z variants were sequenced in order to verify the content and to evaluate the outcome of the constructed library vis-à-vis the library design. Sequencing was performed as described in Example 1 and the amino acid distribution was verified.

[0273] Preparation of Phage Stock:

[0274] Phage stock containing the phagemid library was prepared in a 20 l fermenter (Belach Bioteknik). Cells from a glycerol stock containing the phagemid library were inoculated in 10 l of TSB-YE (Tryptic Soy Broth-Yeast Extract; 30 g/l TSB, 5 g/l yeast extract) supplemented with 1 g/l glucose, 100 mg/l ampicillin and 10 mg/l tetracycline. When the cells reached an optical density at 600 nm (OD₆₀₀) of 0.64, approximately 1.1 l of the cultivation was infected using a 5× molar excess of M13K07 helper phage. The cells were incubated for 30 min, whereupon the fermenter was filled up to 10 l with complex fermentation medium [2.5 g/l (NH₄)₂SO₄; 5.0 g/l yeast extract; 30 g/l tryptone, 2 g/l K₂HPO₄; 3 g/l KH₂PO₄, 1.25 g/l; Na₃C₆H₅O₇.2H₂O; Breox FMT30 antifoaming agent 0.1 ml/1]. The following components were added: 10 ml carbenicillin 25 mg/ml; 5 ml kanamycin 50 mg/ml; 1 ml 1 M isopropyl-β-D-1-thiogalactopyranoside (IPTG); 17.5 ml/l of 300 g/l MgSO₄ and 5 ml of a trace element solution [35 g/l FeCl₃.6H₂O; 10.56 g/l ZnSO₄.7H₂O; 2.64 g/l CuSO₄.5H₂O; 13.2 g/l MnSO₄.H₂O; 13.84 g/l CaCl₂.2H₂O, dissolved in 1.2 M HCl]. A glucose limited fed-batch cultivation was started where a 600 g/l glucose solution was fed to the reactor (3.5 g/h in the start, 37.5 g/h after 20 h and until the end of the cultivation). The pH was controlled at pH 7 through the automatic addition of 25% NH₄OH. Air was supplemented (5 l/min) and the stirrer was set at 500 rpm. After 24 h of fed-batch cultivation the OD₆₀₀ was 22. The cells in the cultivation were pelleted by centrifugation at 15,900 g. The phage particles were precipitated twice from the supernatant in PEG/NaCl, filtered and dissolved in PBS and glycerol as described in Example 1. Phage stocks were stored at −80° C. until use in selection.

### Results

[0275] Library Construction:

[0276] The new library was designed based on a set of IL-6 binding Z variants with verified binding properties (Example 1 and 2). The theoretical size of the designed library was 3.6×10⁹ Z variants. The actual size of the library, determined by titration after transformation to E. coli ER2738 cells, was 3.5×10⁹ transformants.

[0277] The library quality was tested by sequencing of 192 transformants and by comparing their actual sequences with the theoretical design. The contents of the actual library compared to the designed library were shown to be satisfactory. A maturated library of potential binders to IL-6 was thus successfully constructed.

### Example 4

### Selection, Screening and Characterization of Z Variants from the First Maturated Library

### Materials and Methods

[0278] Phage Display Selection of Matured IL-6 Binding Z Variants:

[0279] The target proteins hIL-6 (R&D Systems, cat. no. 206-IL/CF) and mIL-6 (Abnova, cat. no. P4346 II6) were biotinylated as described in Example 1. Phage display selections, using the new library of Z variant molecules described in Example 3, were performed in four cycles against hIL-6 and mIL-6 essentially as described in Example 1 with the following exceptions. At selection, fetal calf serum (FCS, Gibco, cat. no. 10108-165) and human serum albumin (HSA, Albucult, Novozymes, cat. no. 230-005) were added to the selection buffer to a final concentration of 10% and 1.5 μM, respectively. All tubes and beads used in the selection were pre-blocked with PBST 0.1% supplemented with 3% BSA. In cycle 1A, a pre-selection step was performed by incubation of phage stock with SA-beads. The selection volume was 2 ml in cycle 1 for all tracks. For capture of target-bound phage, 1 mg beads per 4 μg biotinylated hIL-6 or mIL-6 was used.

[0280] The six tracks (1-6) in cycle 1 were divided either in the second cycle or the third cycle, resulting in totally seven tracks (1-1 to 6-2) in cycle 2, twelve tracks (1-1-1 to 6-2-1) in cycle 3 and twelve tracks (1-1-1-1 to 6-2-1-1) in cycle 4.

[0281] The bound phage particles were eluted using two different procedures; 1) 500 μl 0.1 M glycine-HCl, pH 2.2, followed by immediate neutralization with 50 μl 1 M Tris-HCl, pH 8.0, and 450 μl PBS, or 2) 500 μl of 100 mM sodium phosphate and 150 mM sodium chloride, pH 5.5 and neutralization with 500 μl PBS.

[0282] An overview of the selection strategy, describing an increased stringency in subsequent cycles obtained by using a lowered target concentration and an increased number of washes, is shown in Table 7.

TABLE 7
Overview of the selection strategy for the first maturation

| | | Phage stock | | Target | | |
|---|---|---|---|---|---|---|
| | Selec- | from library | | concen- | Number | |
| | tion | or selection | Tar- | tration | of | Elution |
| Cycle | track | track | get | (nM) | washes | at |
| 1 | 1 | Zlib006IL-6.I | hIL-6 | 50 | 2 | pH 2.2 |
| 1 | 2 | Zlib006IL-6.I | hIL-6 | 25 | 2 | pH 2.2 |
| 1 | 3 | Zlib006IL-6.I | hIL-6 | 10 | 3 | pH 2.2 |
| 1 | 4 | Zlib006IL-6.I | hIL-6 | 50 | 2 | pH 5.45 |
| 1 | 5 | Zlib006IL-6.I | hIL-6 | 25 | 2 | pH 5.45 |
| 1 | 6 | Zlib006IL-6.I | mIL-6 | 100 | 2 | pH 2.2 |
| 2 | 1-1 | 1 | hIL-6 | 25 | 8 | pH 2.2 |
| 2 | 2-1 | 2 | hIL-6 | 10 | 8 | pH 2.2 |
| 2 | 3-1 | 3 | hIL-6 | 2.5 | 12 | pH 2.2 |
| 2 | 4-1 | 4 | hIL-6 | 25 | 8 | pH 5.45 |
| 2 | 5-1 | 5 | hIL-6 | 10 | 8 | pH 5.45 |
| 2 | 6-1 | 6 | mIL-6 | 100 | 4 | pH 2.2 |
| 2 | 6-2 | 6 | mIL-6 | 50 | 6 | pH 2.2 |
| 3 | 1-1-1 | 1-1 | hIL-6 | 5 | 12 | pH 2.2 |
| 3 | 1-1-2 | 1-1 | hIL-6 | 1.25 | 15 | pH 2.2 |
| 3 | 2-1-1 | 2-1 | hIL-6 | 1.25 | 12 | pH 2.2 |
| 3 | 2-1-2 | 2-1 | hIL-6 | 0.5 | 15 | pH 2.2 |
| 3 | 3-1-1 | 3-1 | hIL-6 | 0.5 | 20 | pH 2.2 |
| 3 | 3-1-2 | 3-1 | hIL-6 | 0.05 | 20 | pH 2.2 |
| 3 | 4-1-1 | 4-1 | hIL-6 | 5 | 12 | pH 5.45 |
| 3 | 4-1-2 | 4-1 | hIL-6 | 1.25 | 15 | pH 5.45 |
| 3 | 5-1-1 | 5-1 | hIL-6 | 2.5 | 12 | pH 5.45 |
| 3 | 5-1-2 | 5-1 | hIL-6 | 1 | 15 | pH 5.45 |
| 3 | 6-1-1 | 6-1 | mIL-6 | 50 | 11 | pH 2.2 |
| 3 | 6-2-1 | 6-2 | mIL-6 | 25 | 11 | pH 2.2 |
| 4 | 1-1-1-1 | 1-1-1 | hIL-6 | 0.5 | 16 | pH 2.2 |
| 4 | 1-1-2-1 | 1-1-2 | hIL-6 | 0.05 | 20 | pH 2.2 |
| 4 | 2-1-1-1 | 2-1-1 | hIL-6 | 0.1 | 16 | pH 2.2 |
| 4 | 2-1-2-1 | 2-1-2 | hIL-6 | 0.025 | 20 | pH 2.2 |
| 4 | 3-1-1-1 | 3-1-1 | hIL-6 | 0.025 | 30 | pH 2.2 |
| 4 | 3-1-2-1 | 3-1-2 | hIL-6 | 0.0025 | 30 | pH 2.2 |
| 4 | 4-1-1-1 | 4-1-1 | hIL-6 | 1 | 16 | pH 5.45 |
| 4 | 4-1-2-1 | 4-1-2 | hIL-6 | 0.1 | 20 | pH 5.45 |
| 4 | 5-1-1-1 | 5-1-1 | hIL-6 | 0.2 | 16 | pH 5.45 |
| 4 | 5-1-2-1 | 5-1-2 | hIL-6 | 0.05 | 20 | pH 5.45 |
| 4 | 6-1-1-1 | 6-1-1 | mIL-6 | 10 | 12 | pH 2.2 |
| 4 | 6-2-1-1 | 6-2-1 | mIL-6 | 1 | 16 | pH 2.2 |

[0283] Amplification of Phage Particles:

[0284] Amplification of phage particles between selection cycle 1 and 2 was performed essentially as described in Example 1, with the following exceptions. E. coli ER2738 was used for phage amplification and M13K07 helper phage was used in 5× excess. The amplification of phage particles between the selection cycles 2 and 4 was done by infection of bacteria in solution according to the following. After infection of log phase E. coli ER2738 with phage particles, TSB supplemented with 2% glucose, 10 μg/ml tetracycline and 100 μg/ml ampicillin was added, followed by incubation with rotation for 30 min at 37° C. Thereafter, the bacteria were infected with M13K07 helper phage. The infected bacteria were pelleted by centrifugation, re-suspended in TSB-YE medium supplemented with 100 μM IPTG, 25 μg/ml kanamycin and 100 μg/ml ampicillin, and grown overnight at 30° C. The overnight cultures were centrifuged and phage particles in the supernatant were precipitated twice with PEG/NaCl buffer. Finally, the phage particles were re-suspended in selection buffer before entering the next selection cycle. In the last selection cycle, log phase bacteria were infected with eluate and diluted before spreading onto TBAB plates (30 g/l tryptose blood agar base, Oxoid cat. no. CMO233B) supplemented with 0.2 g/l ampicillin in order to form single colonies for use in ELISA screening.

[0285] Sequencing of Potential Binders:

[0286] Individual clones from the different selection tracks were picked for sequencing. All clones run in the ELISA screening were sequenced. Amplification of gene fragments and sequence analysis of gene fragments were performed essentially as described in Example 1.

[0287] ELISA Screening of Z Variants:

[0288] Single colonies containing Z variants (expressed as Z variant ABD fusion proteins) were randomly picked from the selected clones of the IL-6 maturated library and cultivated as described in Example 1. Preparation of the periplasmic supernatants was performed as in Example 1 but with six freeze thawing cycles. ELISA screenings were performed essentially as described in Example 1 using biotinylated hIL-6 at a concentration of 0.58 nM. The periplasmic fraction of the primary IL-6 binder Z06814 was used as a positive control. A negative control was created by using periplasm containing ABD only.

[0289] ELISA EC50 Analysis of Human IL-6 Binders:

[0290] A selection of IL-6 binders was subjected to an analysis of the response against a dilution series of biotinylated hIL-6 using ELISA as described above. Biotinylated protein was added at a concentration of 25 nM and diluted stepwise 1:3 down to 11 pM. All Z variants were also assayed without added target protein as a background control. Periplasm samples containing the primary IL-6 binder Z06814 (SEQ ID. NO:1512) were included and analyzed as a positive control. As a negative control, periplasm containing ABD only was assayed against biotinylated hIL-6. Two binders originating from the selection against mIL-6, Z11612 (SEQ ID NO:151) and Z11616 (SEQ ID NO:152) were subjected to an analysis of the response against a dilution series of biotinylated mIL-6 using ELISA as described above. Biotinylated protein was added at a concentration of 227 nM and diluted stepwise 1:3 down to 104 pM. Obtained values were analyzed using GraphPad Prism 5 and non-linear regression.

### Results

[0291] Phage Display Selection of Maturated IL-6 Binding Z Variants:

[0292] Selection was performed in totally 12 parallel tracks containing four cycles each. The different selection tracks differed in target concentration, target type (hIL-6 or mIL-6), selection time, wash conditions and the pH of the elution buffer.

[0293] Sequencing:

[0294] Randomly picked clones were sequenced. Each individual Z variant was given an identification number, Z#####, as described in Example 1. In total, 809 new unique Z variant molecules were identified.

[0295] The amino acid sequences of 58 residues long Z variants are listed in FIG. 1 and in the sequence listing as SEQ ID NO:7, SEQ ID NO:15-89 and SEQ ID NO:151-871. The deduced IL-6 binding motifs (BM) extend from position 8 to position 36 in each sequence. The amino acid sequences of the 49 amino acid residues long polypeptides predicted to constitute the complete three-helix bundle within each of these Z variants (BMod) extend from position 7 to position 55.

[0296] ELISA Screening of Z Variants:

[0297] Clones obtained after four selection cycles were produced in 96-well plates and screened for hIL-6 binding activity using ELISA. All randomly picked clones were analyzed. 796 of the 809 unique Z variants were found to give a response of 3× the negative control or higher (0.3-2.1 AU) against hIL-6 at a concentration of 0.58 nM. Clones from all selection tracks using hIL-6 as selection target showed positive signals. The negative controls had absorbencies of 0.078-0.102 AU. The average response of the blank controls of a representative set of plates was 0.087 AU.

[0298] ELISA EC50 Analysis of IL-6 Binders:

[0299] A subset of Z variants was selected based on the result in the ELISA experiment described above (highest ELISA value normalized against the positive control on each plate, respectively) and subjected to a target titration in ELISA format. Periplasm samples were incubated with a serial dilution of biotinylated hIL-6 or mIL-6. A periplasm sample with the primary binder Z06814 (SEQ ID NO:1512) was also assayed against hIL-6 as a positive control. Obtained values were analyzed and their respective EC50 values were calculated (Tables 8 and 9).

TABLE 8
Calculated EC50 values against hIL-6

| | | EC50 |
|---|---|---|
| | SEQ ID | ELISA |
| Z variant | NO | (M) |
| Z11213 | 15 | 1.5 × 10⁻¹⁰ |
| Z11214 | 16 | 1.3 × 10⁻¹⁰ |
| Z11215 | 17 | 1.4 × 10⁻¹⁰ |
| Z11217 | 18 | 1.3 × 10⁻¹⁰ |
| Z11222 | 19 | 1.4 × 10⁻¹⁰ |
| Z11251 | 20 | 1.4 × 10⁻¹⁰ |
| Z11277 | 21 | 1.2 × 10⁻¹⁰ |
| Z11278 | 22 | 1.5 × 10⁻¹⁰ |
| Z11283 | 23 | 1.8 × 10⁻¹⁰ |
| Z11300 | 24 | 1.9 × 10⁻¹⁰ |
| Z11321 | 25 | 1.4 × 10⁻¹⁰ |
| Z11329 | 26 | 1.4 × 10⁻¹⁰ |
| Z11351 | 27 | 1.7 × 10⁻¹⁰ |
| Z11380 | 28 | 1.7 × 10⁻¹⁰ |
| Z11384 | 29 | 1.5 × 10⁻¹⁰ |
| Z11433 | 30 | 2.1 × 10⁻¹⁰ |
| Z11472 | 31 | 1.8 × 10⁻¹⁰ |
| Z11552 | 32 | 1.2 × 10⁻⁹ |
| Z11632 | 7 | 1.9 × 10⁻¹⁰ |
| Z11642 | 33 | 2.3 × 10⁻¹⁰ |
| Z11644 | 34 | 2.4 × 10⁻¹⁰ |
| Z11674 | 35 | 2.6 × 10⁻¹⁰ |
| Z11698 | 36 | 2.0 × 10⁻¹⁰ |
| Z11711 | 37 | 3.5 × 10⁻¹⁰ |
| Z11723 | 38 | 2.5 × 10⁻¹⁰ |
| Z11781 | 39 | 2.9 × 10⁻¹⁰ |
| Z11784 | 40 | 2.7 × 10⁻¹⁰ |
| Z11788 | 41 | 2.5 × 10⁻¹⁰ |
| Z11789 | 42 | 2.4 × 10⁻¹⁰ |
| Z11791 | 43 | 3.4 × 10⁻¹⁰ |
| Z11794 | 44 | 2.2 × 10⁻¹⁰ |
| Z11802 | 45 | 2.6 × 10⁻¹⁰ |
| Z11803 | 46 | 2.8 × 10⁻¹⁰ |
| Z11805 | 47 | 3.4 × 10⁻¹⁰ |
| Z11814 | 48 | 2.5 × 10⁻¹⁰ |
| Z11815 | 49 | 2.8 × 10⁻¹⁰ |
| Z11817 | 50 | 2.5 × 10⁻¹⁰ |
| Z11818 | 51 | 2.4 × 10⁻¹⁰ |
| Z11819 | 52 | 2.5 × 10⁻¹⁰ |
| Z11823 | 53 | 2.1 × 10⁻¹⁰ |
| Z11824 | 54 | 2.3 × 10⁻¹⁰ |
| Z11833 | 55 | 2.9 × 10⁻¹⁰ |
| Z11835 | 56 | 2.9 × 10⁻¹⁰ |
| Z11836 | 57 | 3.6 × 10⁻¹⁰ |
| Z11860 | 58 | 1.8 × 10⁻¹⁰ |
| Z11861 | 59 | 2.2 × 10⁻¹⁰ |
| Z11862 | 60 | 1.9 × 10⁻¹⁰ |
| Z11865 | 61 | 2.3 × 10⁻¹⁰ |
| Z11866 | 62 | 2.5 × 10⁻¹⁰ |
| Z11871 | 63 | 1.7 × 10⁻¹⁰ |
| Z11872 | 64 | 2.8 × 10⁻¹⁰ |
| Z11874 | 65 | 3.1 × 10⁻¹⁰ |
| Z11875 | 66 | 2.1 × 10⁻¹⁰ |
| Z11881 | 67 | 1.7 × 10⁻¹⁰ |
| Z11882 | 68 | 1.4 × 10⁻¹⁰ |
| Z11883 | 69 | 2.1 × 10⁻¹⁰ |
| Z11890 | 70 | 1.9 × 10⁻¹⁰ |
| Z11892 | 71 | 2.3 × 10⁻¹⁰ |
| Z11893 | 72 | 2.0 × 10⁻¹⁰ |
| Z11895 | 73 | 2.8 × 10⁻¹⁰ |
| Z11896 | 74 | 2.9 × 10⁻¹⁰ |
| Z11897 | 75 | 3.0 × 10⁻¹⁰ |
| Z11901 | 76 | 1.7 × 10⁻¹⁰ |
| Z11903 | 77 | 2.3 × 10⁻¹⁰ |
| Z11904 | 78 | 2.4 × 10⁻¹⁰ |
| Z11905 | 79 | 3.1 × 10⁻¹⁰ |
| Z11906 | 80 | 2.5 × 10⁻¹⁰ |
| Z11907 | 81 | 3.6 × 10⁻¹⁰ |
| Z11912 | 82 | 1.8 × 10⁻¹⁰ |
| Z11918 | 83 | 3.2 × 10⁻¹⁰ |
| Z11922 | 84 | 2.7 × 10⁻¹⁰ |
| Z11923 | 85 | 2.1 × 10⁻¹⁰ |
| Z11929 | 86 | 2.6 × 10⁻¹⁰ |
| Z11933 | 87 | 1.6 × 10⁻¹⁰ |
| Z11937 | 88 | 3.0 × 10⁻¹⁰ |
| Z11939 | 89 | 2.1 × 10⁻¹⁰ |
| Z06814 | 1512 | 2.9 × 10⁻¹⁰ |

TABLE 9
Calculated EC50 values against mIL-6

| | SEQ ID | EC50 ELISA |
|---|---|---|
| Z variant | NO | (M) |
| Z11612 | 151 | 9.3 × 10⁻⁹ |
| Z11616 | 152 | 7.7 × 10⁻⁹ |

### Example 5

### Design and Construction of a Second Maturated Library of IL-6 Binding Z Variants

[0300] In this Example, a second maturated library was constructed essentially as described in Example 4. The library was used for selections of

[0301] IL-6 binding Z variants.

### Materials and Methods

[0302] Library Design:

[0303] The library was primarily based on a selection of sequences of the human IL-6 binding Z variants described in Example 4. In the new library, 13 variable positions in the Z molecule scaffold were biased towards certain amino acid residues, according to a strategy mainly based on the Z variants from the first maturation, i.e. sequences defined in SEQ ID NO:7, SEQ ID NO:15-89 and SEQ ID NO:151-871. Randomized double stranded linkers were generated by the Colibra™ technology, which enables incorporation of randomized sets of trinucleotide building blocks using ligations and restrictions of the subsequently built up double stranded DNA. A library of double-stranded DNA, 5′-AA ATA AAT CTC GAG GTA GAT GCC AAA TAO GCC AAA GAA NNN NNN NNN GCT NNN NNN GAG ATC NNN NNN CTG CCG AAC CTG ACC NNN NNN CAG NNN NNN GCC TTC ATC NNN AAA TTA NNN GAT GAO CCA AGC CAG AGC TCA TTA TTT A-3′ (SEQ ID NO:1564; randomized codons are denoted NNN) encoding a partially randomized helix 1 and 2 of the Z variant amino acid sequence, flanked by restriction sites XhoI and SacI, was ordered from Isogenica (Essex, UK). The theoretical distributions of amino acid residues in the new library, including eight variable amino acid positions (10, 11, 14, 18, 24, 25, 27 and 32) and five constant amino acid positions (9, 13, 17, 28, and 35) in the Z molecule scaffold are given in Table 10. The resulting theoretical library size was 2.6×10⁷ variants.

[0304] Library Construction and Phage Stock Preparation:

[0305] The library was constructed essentially as described in Example 3. Phage stock of the library was prepared as described in Example 3.

TABLE 10
Library design, second maturation

| | | No of | |
|---|---|---|---|
| Amino acid | | amino | |
| position in Z | Allowed amino acids | acids | Proportion |
| 9 | E | 1 | 1/1 |
| 10 | A, D, E, F, H, I, K, L, N, Q, R, S, T, | 1 | 1/16 |
| | V, W, Y | | |
| 11 | A, D, E, F, G, H, I, K, L, M, N, Q, | 17 | 1/18 |
| | R, S, T, V, W, Y | | |
| 13 | W | 1 | 1/1 |
| 14 | A, D, E, F, H, I, K, L, M, N, Q, R, | 7 | 1/17 |
| | S, T, V, W, Y | | |
| 17 | H | 1 | 1/1 |
| 18 | A, D, E, F, G, H, I, K, L, N, Q, R, S, | 17 | 1/17 |
| | T, V, W, Y | | |
| 24 | I, L, V | 1 | 1/3 |
| 25 | A, D, E, F, G, H, I, K, L, N, Q, R, S, | 10 | 1/17 |
| | T, V, W, Y | | |
| 27 | I, M, V | 1 | 1/3 |
| 28 | A | 12 | 1/1 |
| 32 | S, T | 16 | 1/2 |
| 35 | F | 1 | 1/1 |

### Results

[0306] Library Construction and Phage Stock Preparation:

[0307] The new library was designed based on a set of IL-6 binding Z variants with verified binding properties (Example 4). The theoretical size of the designed library was 2.6×10⁷ Z variants. The actual size of the library, determined by titration after transformation to E. coli ER2738 cells, was 1.8×10⁹ transformants.

[0308] The library quality was tested by sequencing of 192 transformants and by comparing their actual sequences with the theoretical design. The contents of the actual library compared to the theoretical library were shown to be satisfying. A maturated library of potential binders to IL-6 was thus successfully constructed.

### Example 6

### Selection, Screening and Characterization of Z Variants from the Second Maturated Library

### Materials and Methods

[0309] Second Phage Display Selection of Maturated IL-6 Binding Z Variants:

[0310] The target protein hIL-6 was biotinylated as described in Example 4. Phage display selections, using the second maturated library of Z variant molecules described in Example 5 were performed against hIL-6 essentially as described in Example 4, with the following exceptions. The selection volume was 4 ml in cycle 1 for all tracks. In cycle 2, selection tracks 1-2 and 1-3 were handled in one common tube and not separated until after the last 1 min wash, whereupon they were treated separately. Also in cycle 4, each set of the selection tracks 1-1-1-1 to 1-1-1-3, 1-1-1-4 to 1-1-1-6, 1-1-2-1 to 1-1-2-3 and 1-1-2-4 to 1-1-2-6, respectively, were handled in a common tube and split into three separate tubes after the last 1 min wash and thereafter treated separately using the different washing strategies outlined in Table 11. The bound phage particles were eluted using glycine-HCl, pH 2.2, as described in Example 1. The amplification of phage particles between the selection cycles was performed essentially as described in Example 1.

[0311] An overview of the selection strategy and parameters used, describing the differences in the selection tracks in terms of lowered target concentration and an increased number of washes, is shown in Table 11.

TABLE 11
Overview of the selection strategy for the second maturation

| | | Phage stock | | | | Number of 4 | | |
|---|---|---|---|---|---|---|---|---|
| | | from library | Target | | | h washes | Number of | Number of |
| | Selection | or selection | concentration | Number of 1 | Number of 4 | with unlabeled | overnight | over weekend |
| Cycle | track | track | (nM) | min washes | h washes | Z06814 | washes | washes |
| 1 | 1 | Zlib006IL-6A.II | 50 | 5 | — | — | — | — |
| 1 | 2 | Zlib006IL-6A.II | 10 | 5 | — | — | — | — |
| 2 | 1-1 | 1 | 10 | 15 | — | — | — | — |
| 2 | 1-2 | 1 | 5 | 15 | — | — | — | — |
| 2 | 1-3 | 1 | 5 | 15 | 1 | — | — | — |
| 2 | 2-1 | 2 | 2.5 | 12 | — | — | — | — |
| 3 | 1-1-1 | 1-1 | 1 | 5 | — | 1 | — | — |
| 3 | 1-1-2 | 1-1 | 1 | 5 | — | 1 | — | — |
| 3 | 1-2-1 | 1-2 | 0.5 | 15 | — | — | — | — |
| 3 | 1-3-1 | 1-3 | 0.5 | 15 | — | — | — | — |
| 3 | 2-1-1 | 2-1 | 0.5 | 12 | — | — | — | — |
| 3 | 2-1-2 | 2-1 | 0.1 | 12 | — | — | — | — |
| 4 | 1-1-1-1 | 1-1-1 | 1 | 5 | — | 1 | — | — |
| 4 | 1-1-1-2 | 1-1-1 | 1 | 5 | — | — | 1 | — |
| 4 | 1-1-1-3 | 1-1-1 | 1 | 5 | — | — | — | 1 |
| 4 | 1-1-1-4 | 1-1-1 | 1 | 5 | — | 1 | — | — |
| 4 | 1-1-1-5 | 1-1-1 | 1 | 5 | — | — | 1 | — |
| 4 | 1-1-1-6 | 1-1-1 | 1 | 5 | — | — | — | 1 |
| 4 | 1-1-2-1 | 1-1-2 | 1 | 5 | — | 1 | — | — |
| 4 | 1-1-2-2 | 1-1-2 | 1 | 5 | — | — | 1 | — |
| 4 | 1-1-2-3 | 1-1-2 | 1 | 5 | — | — | — | 1 |
| 4 | 1-1-2-4 | 1-1-2 | 1 | 5 | — | 1 | — | — |
| 4 | 1-1-2-5 | 1-1-2 | 1 | 5 | — | — | 1 | — |
| 4 | 1-1-2-6 | 1-1-2 | 1 | 5 | — | — | — | 1 |
| 4 | 1-2-1-1 | 1-2-1 | 0.5 | 15 | — | — | — | — |
| 4 | 1-2-1-2 | 1-2-1 | 0.5 | 15 | 1 | — | — | — |
| 4 | 1-3-1-1 | 1-3-1 | 0.5 | 15 | — | — | — | — |
| 4 | 2-1-1-1 | 2-1-1 | 0.5 | 12 | — | — | — | — |
| 4 | 2-1-2-1 | 2-1-2 | 0.1 | 12 | — | — | — | — |

[0312] Sequencing of Potential Binders:

[0313] Individual clones from the different selection tracks were picked for sequencing. All clones subjected to the ELISA screening were sequenced. Amplification of gene fragments and sequence analysis of gene fragments were performed essentially as described in Example 1.

[0314] ELISA Screening of Z Variants:

[0315] Single colonies containing Z variants (expressed as Z variant ABD fusion proteins as described in Example 1) were randomly picked from the selected clones of the IL-6 second maturated library and cultivated as described in Example 1. Preparation of the periplasmic supernatants and ELISA screenings were performed essentially as described in Example 1 and freeze thawing was performed in 150 μl PBST 0.05% and repeated 8 times. Biotinylated hIL-6 was used at a concentration of 0.25 nM. The periplasmic fraction of the IL-6 binder Z06814 (SEQ ID NO:1512) was used in duplicate as positive control on each ELISA plate. As a negative control, periplasm containing ABD only was assayed against biotinylated hIL-6.

[0316] ELISA EC50 Analysis of IL-6 Binders:

[0317] A selection of IL-6 binders was subjected to an analysis of the response against a dilution series of biotinylated hIL-6 using ELISA as described in Example 2. Biotinylated protein was added at a concentration of 5 nM and diluted stepwise 1:3 down to 83 fM. As a background control, all Z variants were also assayed with without added target protein. Periplasm samples containing the primary IL-6 binder Z06814 (SEQ ID NO:1512) as well as maturated binder Z11632 (SEQ ID NO:7) were included as positive controls. As a negative control, periplasm containing ABD only was assayed against biotinylated hIL-6. Obtained values were analyzed using GraphPad Prism 5 and non-linear regression.

### Results

[0318] Second Phage Display Selection of Maturated IL-6 Binding Z Variants:

[0319] Selection was performed in 17 parallel tracks in total, each track containing four cycles. The selection tracks differed in target concentration, selection time and wash conditions as outlined in Table 11.

[0320] Sequencing of Potential Binders:

[0321] Randomly picked clones were sequenced. Each individual Z variant was given an identification number, Z#####, as described in Example 1. In total, 707 new unique Z variant molecules were identified. The amino acid sequences of 58 residues long Z variants are listed in FIG. 1 and in the sequence listing as SEQ ID NO:1-6, SEQ ID NO:8-14, SEQ ID NO:90-150 and SEQ ID NO:872-1502. The deduced IL-6 binding motifs (BM) extend from position 8 to position 36 in each sequence. The amino acid sequences of the 49 amino acid residues long polypeptides predicted to constitute the complete three-helix bundle within each of these Z variants (BMod) extend from position 7 to position 55.

[0322] ELISA Screening of Z Variants:

[0323] Clones obtained after four selection cycles were produced in 96-well plates and screened for human IL-6 binding activity using ELISA. All randomly picked clones were analyzed. 705 of the 707 unique Z variants were found to give a response of 3× the negative controls or higher (0.3-2.3 AU) against hIL-6 at a concentration of 0.25 nM. Positive signals were shown for clones originating from all selection tracks. The average response of the negative controls on the plates was 0.085 AU.

[0324] ELISA EC50 Analysis of IL-6 Binders:

[0325] A subset of Z variants was selected based on the result in the ELISA experiment described above. All Z variants exhibiting an absorbance of over 1.6 AU or a response over 1.7 after normalizing the response against the average response of the duplicate positive control Z06814 (SEQ ID NO:1512) on each plate were subjected to a target titration in ELISA format as described in Example 4. Periplasm samples with the maturated binder Z11632 (SEQ ID NO:7) as well as the primary binder Z06814 (SEQ ID NO:1512) were also assayed as positive controls. Obtained values were analyzed and their respective EC50 values were calculated (Table 12).

TABLE 12
Calculated EC50 values from ELISA titration analysis of Z variants
from the second maturation as well as positive controls
Z06814 and Z11632

| | | EC50 |
|---|---|---|
| | SEQ ID | ELISA |
| Z variant | NO | (M) |
| Z14521 | 90 | 2.3 × 10⁻¹⁰ |
| Z14524 | 91 | 2.7 × 10⁻¹⁰ |
| Z14525 | 92 | 2.5 × 10⁻¹⁰ |
| Z14538 | 93 | 3.2 × 10⁻¹⁰ |
| Z14547 | 94 | 2.5 × 10⁻¹⁰ |
| Z14550 | 95 | 2.7 × 10⁻¹⁰ |
| Z14551 | 96 | 2.6 × 10⁻¹⁰ |
| Z14556 | 97 | 2.8 × 10⁻¹⁰ |
| Z14559 | 98 | 2.3 × 10⁻¹⁰ |
| Z14596 | 99 | 2.4 × 10⁻¹⁰ |
| Z14609 | 100 | 3.0 × 10⁻¹⁰ |
| Z14614 | 101 | 3.8 × 10⁻¹⁰ |
| Z14620 | 102 | 3.1 × 10⁻¹⁰ |
| Z14630 | 6 | 2.5 × 10⁻¹⁰ |
| Z14634 | 103 | 2.3 × 10⁻¹⁰ |
| Z14645 | 104 | 2.5 × 10⁻¹⁰ |
| Z14651 | 105 | 2.4 × 10⁻¹⁰ |
| Z14662 | 106 | 2.7 × 10⁻¹⁰ |
| Z14673 | 107 | 2.3 × 10⁻¹⁰ |
| Z14700 | 8 | 2.4 × 10⁻¹⁰ |
| Z14706 | 108 | 2.3 × 10⁻¹⁰ |
| Z14710 | 109 | 2.6 × 10⁻¹⁰ |
| Z14712 | 9 | 2.6 × 10⁻¹⁰ |
| Z14720 | 110 | 2.2 × 10⁻¹⁰ |
| Z14722 | 111 | 3.2 × 10⁻¹⁰ |
| Z14731 | 112 | 2.1 × 10⁻¹⁰ |
| Z14746 | 113 | 2.8 × 10⁻¹⁰ |
| Z14765 | 114 | 2.7 × 10⁻¹⁰ |
| Z14767 | 115 | 2.4 × 10⁻¹⁰ |
| Z14782 | 116 | 2.4 × 10⁻¹⁰ |
| Z14783 | 117 | 2.4 × 10⁻¹⁰ |
| Z14784 | 118 | 2.5 × 10⁻¹⁰ |
| Z14788 | 119 | 3.0 × 10⁻¹⁰ |
| Z14829 | 120 | 2.7 × 10⁻¹⁰ |
| Z14861 | 4 | 2.3 × 10⁻¹⁰ |
| Z14862 | 10 | 2.2 × 10⁻¹⁰ |
| Z14867 | 121 | 2.6 × 10⁻¹⁰ |
| Z14868 | 122 | 2.8 × 10⁻¹⁰ |
| Z14878 | 123 | 2.9 × 10⁻¹⁰ |
| Z14888 | 124 | 2.2 × 10⁻¹⁰ |
| Z14929 | 125 | 2.1 × 10⁻¹⁰ |
| Z14944 | 126 | 1.9 × 10⁻¹⁰ |
| Z14976 | 1 | 1.6 × 10⁻¹⁰ |
| Z14984 | 5 | 1.6 × 10⁻¹⁰ |
| Z14990 | 127 | 2.5 × 10⁻¹⁰ |
| Z14992 | 128 | 2.8 × 10⁻¹⁰ |
| Z15003 | 129 | 3.0 × 10⁻¹⁰ |
| Z15015 | 2 | 1.8 × 10⁻¹⁰ |
| Z15024 | 130 | 3.1 × 10⁻¹⁰ |
| Z15025 | 131 | 2.1 × 10⁻¹⁰ |
| Z15031 | 132 | 2.1 × 10⁻¹⁰ |
| Z15036 | 11 | 2.4 × 10⁻¹⁰ |
| Z15042 | 133 | 2.2 × 10⁻¹⁰ |
| Z15053 | 134 | 2.4 × 10⁻¹⁰ |
| Z15057 | 135 | 2.3 × 10⁻¹⁰ |
| Z15067 | 136 | 2.2 × 10⁻¹⁰ |
| Z15079 | 137 | 2.1 × 10⁻¹⁰ |
| Z15082 | 138 | 2.2 × 10⁻¹⁰ |
| Z15097 | 139 | 2.2 × 10⁻¹⁰ |
| Z15102 | 140 | 2.1 × 10⁻¹⁰ |
| Z15110 | 12 | 2.0 × 10⁻¹⁰ |
| Z15111 | 141 | 2.3 × 10⁻¹⁰ |
| Z15117 | 142 | 2.1 × 10⁻¹⁰ |
| Z15122 | 3 | 1.7 × 10⁻¹⁰ |
| Z15126 | 13 | 1.5 × 10⁻¹⁰ |
| Z15129 | 143 | 2.1 × 10⁻¹⁰ |
| Z15140 | 144 | 2.1 × 10⁻¹⁰ |
| Z15141 | 145 | 2.3 × 10⁻¹⁰ |
| Z15142 | 14 | 1.6 × 10⁻¹⁰ |
| Z15145 | 146 | 2.3 × 10⁻¹⁰ |
| Z15151 | 147 | 1.9 × 10⁻¹⁰ |
| Z15159 | 148 | 1.8 × 10⁻¹⁰ |
| Z15162 | 149 | 1.8 × 10⁻¹⁰ |
| Z15164 | 150 | 2.0 × 10⁻¹⁰ |
| Z06814 | 1512 | 3.2 × 10⁻¹⁰ |
| Z11632 | 7 | 2.5 × 10⁻¹⁰ |

### Example 7

### Subcloning, Production and Characterization of a Subset of IL-6 Binding Z Variants

[0326] In this Example, a subset of affinity-matured IL-6 binding Z variants were produced and functionally assessed by SPR, ELISA, cell-based assays and CD. SPR was used for measuring the kinetic parameters of Z variants interacting with IL-6. Competition ELISA was applied to investigate the binding mode of Z variants to human IL-6 protein. A TF-1 cell-based assay was applied to assess the ability of Z variants to block IL-6 dependent signaling. CD was used to investigate the secondary structure of the Z variants and determine their melting temperatures.

### Materials and Methods

[0327] Subcloning of Z Variants into Expression Vectors:

[0328] The DNA of 14 IL-6 binding Z variants, Z11632 (SEQ ID NO:7), Z14630 (SEQ ID NO:6), Z14700 (SEQ ID NO:8), Z14712 (SEQ ID NO:9), Z14861 (SEQ ID NO:4), Z14862 (SEQ ID NO:10), Z14976 (SEQ ID NO:1), Z14984 (SEQ ID NO:5), Z15015 (SEQ ID NO:2), Z15036 (SEQ ID NO:11), Z15110 (SEQ ID NO:12), Z15122 (SEQ ID NO:3), Z15126 (SEQ ID NO:13) and Z15142 (SEQ ID NO:14), was amplified from the library vector pAY02592. The subcloning was performed as described in Example 2. The Z gene fragments were subcloned into the expression vector pAY01448 resulting in the encoded sequence MGSSHHHHHHLQ-[Z#####]-VD.

[0329] Protein Expression and Purification Under Denatured Conditions:

[0330] E. coli Rosetta cells (Novagen) were transformed with plasmids containing the gene fragment of each respective IL-6 binding Z variant and cultivated at 37° C. in 100 ml of TSB-YE medium supplemented with 50 μg/ml kanamycin. Expression was induced at OD₆₀₀=0.8 by addition of IPTG at a final concentration of 1 mM and the cultures were incubated at 25° C. for another 16-20 h. The cells were harvested by centrifugation.

[0331] Protein purification was performed under denatured conditions essentially as described in Example 2. Protein concentrations were determined by measuring the absorbance at 280 nm, using the extinction coefficient of the respective protein. The purity of the IL-6 binding Z variants was analyzed by SDS-PAGE stained with Coomassie Blue.

[0332] Protein Expression and Purification Under Native Conditions:

[0333] E. coli BL21 (DE3) cells (NEB, cat. no. C2527I) were transformed with plasmids containing gene fragments of matured variants Z11632 (SEQ ID NO:7), Z14630 (SEQ ID NO:6), Z14700 (SEQ ID NO:8), Z14712 (SEQ ID NO:9), Z14861 (SEQ ID NO:4), Z14862 (SEQ ID NO:10), Z14976 (SEQ ID NO:1), Z14984 (SEQ ID NO:5), Z15015 (SEQ ID NO:2), Z15036 (SEQ ID NO:11), Z15110 (SEQ ID NO:12), Z15122 (SEQ ID NO:3), Z15142 (SEQ ID NO:14), of the primary Z variant Z06814 (SEQ ID NO:1512), as well as of the control Z variant Z04726 (SEQ ID NO:1553). Transformed bacterial cells were cultivated at 37° C. in 1000 ml of LB medium supplemented with 50 μg/ml kanamycin. In order to induce protein expression, IPTG was added to a final concentration of 0.1 mM at OD₆₀₀=0.8 and the cultures were incubated at 25° C. for 17 h. The cells were harvested by centrifugation at 4° C. and 8000 rpm for 30 min. Supernatants were discarded and cell pellets re-suspended in 10 ml PBS. After cell disruption by sonication, cell debris was removed by centrifugation and each supernatant was applied on 2 ml Ni-NTA columns (QIAGEN, cat. no. 30410) equilibrated with 20 ml wash buffer (20 mM NaH₂PO₄, 10 mM NaCl, 20 mM imidazole, pH 6.0). Contaminants were removed by washing with wash buffer, and Z variants were eluted with elution buffer (20 mM NaH₂PO₄, 10 mM NaCl, 250 mM imidazole, pH 6.0). The eluents were subjected to purification on an ion exchange column (Life Technologies, cat. no. 4481317), and Z variants were eluted by an increasing salt concentration. Buffer solutions of eluents were then changed to PBS (10 mM Na₂HPO₄, 1.8 mM KH₂PO₄, 137 mM NaCl, 2.7 mM KCl) using a VIVASPIN 6 column (Sartorius, cat. no. VS0691). The purity of Z variants was analyzed by SDS-PAGE stained with Coomassie Blue.

[0334] ProteOn Kinetic Analysis:

[0335] Kinetic constants (kₒₙ and k_{off}) and affinities (K_{D}) for human IL-6 were determined for 6 His₆-tagged Z variants purified under denatured conditions. The IL-6 binding variants Z06814 (SEQ ID NO:1512), Z14861 (SEQ ID NO:4), Z014976 (SEQ ID NO:1), Z14984 (SEQ ID NO:5), Z15015 (SEQ ID NO:2), and Z15122 (SEQ ID NO:3) were diluted to 5 μg/ml in 10 mM NaAc buffer, pH 4.5, and immobilized separately on GLC chip (Bio-Rad, cat. no. 176-5011). The immobilization was performed using amine coupling chemistry according to the manufacturer's recommendations and PBST 0.05% was used as running buffer. PBST 0.05% was also used as running buffer in the kinetic experiment using a flow rate was 60 μl/min. The analyte hIL-6 was diluted in the PBST 0.05% running buffer to final concentrations of 50 nM, 12.5 nM, 3.1 nM, 0.78 nM, 0.19 nM and 0 nM and injected in triplicate for 3 min, followed by dissociation in running buffer for 90 min. After dissociation, the surfaces were regenerated with HCl supplemented with 0.05% Tween 20. Kinetic constants were calculated from the sensorgrams using a 1:1 model in Bio-Rad manager Software (Bio-Rad).

[0336] Analysis of Binding Site:

[0337] The interference of 14 maturated IL-6 binding Z variants (purified under denatured conditions) with the interaction between human gp130 (hgp130) and hIL-6/hIL-6Rα was assessed as described in Example 2. The primary binder Z06814 and the hIL-6Rα binding antibody tocilizumab, were included for comparison.

[0338] TF-1 Cell-Based Assay:

[0339] TF-1 cells were cultured in RPMI1640 with L-glutamine (HyClone, cat. no. SH30027) supplemented with 10% FBS (HyClone, cat. no. SH30919.03), Pen-Strep (HyClone, cat. no. 15140-163) and 2 ng/ml rhGM-CSF (R&D Systems, cat. no. 215-GM-010). Prior to use, cells were washed twice in RPMI-1640 in absence of rhGM-CSF. Cells were then counted and dispensed into a 96-well plate (Corning, cat. no. 3596) at a density of 4×10⁴ cells per well. In separate plates, serial dilutions (concentration range 10-0.00061 nM) of Z variants (purified under native conditions), tocilizumab (Roche) and control IgG (Jackson Immunoresearch, cat. no. Jac-009-000-003) were incubated in the presence of 0.099 nM rhIL-6 (R&D Systems, cat. no. 206-IL/CF). These pre-mixtures were then transferred to wells containing TF-1 cells, which were incubated for 72 h at 37° C. in a humidified 5% CO₂ atmosphere. During the last four hours of incubation, 10 μl of WST (DoGen, cat. no. EZ3000) were included per well. The absorbance was measured at 450 nM using a Victor X3 plate reader (Perkin Elmer). Relative cell viability was calculated by dividing the absorbance of each well by the mean absorbance of IL-6-treated wells in each plate. The data was assessed by non-linear regression to a four-parameter dose-response curve, and the half-maximal inhibitory concentration (IC50) was determined using Graphpad Prism software.

[0340] CD Analysis:

[0341] CD analysis was performed as described in Example 2 using Z variants purified under native conditions.

### Results

[0342] ProteOn Kinetic Analysis:

[0343] The interactions of 6 His₆-tagged IL-6-binding Z variants with human IL-6 were analyzed in a ProteOn instrument by injecting various concentrations of the hIL-6 over surfaces containing different immobilized Z variants. The ligand immobilization levels of the surfaces were between 100-220 RU each. A summary of the kinetic parameters (K_{D}, kₐ (kₒₙ) and k_{d} (k_{off})) for binding of hIL-6 to the Z variants using a 1:1 interaction model is given in Table 13.

TABLE 13
Kinetic parameters for binding of hIL-6 to Z variants

| Z variant | SEQ ID NO: | kₒₙ (M⁻¹s⁻¹) | k_{off} (s⁻¹) | K_{D} (M) |
|---|---|---|---|---|
| His₆-Z06814 | 1512 | 4.3 × 10⁵ | 8.8 × 10⁻⁵ | 2.0 × 10⁻¹⁰ |
| His₆-Z14861 | 4 | 3.6 × 10⁵ | 6.3 × 10⁻⁵ | 1.7 × 10⁻¹⁰ |
| His₆-Z14976 | 1 | 3.1 × 10⁵ | 2.7 × 10⁻⁵ | 8.8 × 10⁻¹¹ |
| His₆-Z14984 | 5 | 3.0 × 10⁵ | 7.4 × 10⁻⁵ | 2.5 × 10⁻¹⁰ |
| His₆-Z15015 | 2 | 4.3 × 10⁵ | 7.2 × 10⁻⁵ | 1.7 × 10⁻¹⁰ |
| His₆-Z15122 | 3 | 3.1 × 10⁵ | 3.9 × 10⁻⁵ | 1.2 × 10⁻¹⁰ |

[0344] Analysis of Binding Site:

[0345] All maturated IL-6 binding Z variants showed a clear concentration-dependent blocking of the trans-signaling resembling interaction between preformed hIL-6/hIL-6Rα and hgp130 (FIG. 5). Each maturated Z variant showed a higher blocking capacity than both the primary binder Z06814 and tocilizumab, i.e. which would correspond to IC50 values less than 1.6 nM.

[0346] TF-1 Cell-Based Assay:

[0347] A TF-1 cell-based assay was conducted to evaluate the efficacy and potency of IL-6 binding Z variants in the classical signaling pathway. This assay showed that all affinity-matured IL-6 binding Z variants were capable of blocking IL-6 dependent growth of the TF-1 cells (FIG. 6). The calculated IC50 values for Z variants and for the hIL-6Rα binding antibody tocilizumab are shown in Table 14.

TABLE 14
IC50 values for matured Z variants blocking the IL-6 dependent
growth of TF-1 cells

| Z variant | SEQ ID NO: | IC50 (M) |
|---|---|---|
| His₆-Z11632 | 7 | 1.2 × 10⁻¹⁰ |
| His₆-Z14630 | 6 | 8.7 × 10⁻¹¹ |
| His₆-Z14700 | 8 | 1.0 × 10⁻¹⁰ |
| His₆-Z14712 | 9 | 2.2 × 10⁻¹⁰ |
| His₆-Z14861 | 4 | 1.9 × 10⁻¹⁰ |
| His₆-Z14862 | 10 | 4.3 × 10⁻¹⁰ |
| His₆-Z14976 | 1 | 4.2 × 10⁻¹¹ |
| His₆-Z14984 | 5 | 2.7 × 10⁻¹⁰ |
| His₆-Z15015 | 2 | 2.7 × 10⁻¹¹ |
| His₆-Z15036 | 11 | 1.8 × 10⁻¹⁰ |
| His₆-Z15110 | 12 | 9.3 × 10⁻¹⁰ |
| His₆-Z15122 | 3 | 8.5 × 10⁻¹¹ |
| His₆-Z15142 | 14 | 5.1 × 10⁻¹⁰ |
| His₆-Z06814 | 1512 | 1.3 × 10⁻¹⁰ |
| tocilizumab | N/A | 4.1 × 10⁻¹⁰ |

[0348] CD Analysis:

[0349] The CD spectra determined for 10 matured Z variants showed that each one had an α-helical structure at 20° C. The melting temperatures (Tm) determined by variable temperature measurement are shown in Table 15.

TABLE 15
Melting temperatures for a subset of matured Z variants

| Z variant | SEQ ID NO: | Tm (° C.) |
|---|---|---|
| His₆-Z11632 | 7 | 51 |
| His₆-Z14630 | 6 | 57 |
| His₆-Z14700 | 8 | 53 |
| His₆-Z14712 | 9 | 55 |
| His₆-Z14861 | 4 | 48 |
| His₆-Z14862 | 10 | 53 |
| His₆-Z15015 | 2 | 56 |
| His₆-Z15036 | 11 | 59 |
| His₆-Z15110 | 12 | 50 |
| His₆-Z15142 | 14 | 53 |

### Example 8

### In Vivo Activity of IL-6 Binding Z Variants in Fusion with ABD

[0350] A Serum Amyloid A (SAA) mouse model was used in order to explore the in vivo blocking effect of the IL-6 binding Z variants in fusion with ABD. The acute phase protein SAA is secreted from liver cells and can be induced by the proinflammatory cytokines IL-1, IL-6 and TNF. Due to the sequence homology of the human and mouse cytokines, the human variants are able to act on their corresponding mouse receptors and induce a murine SAA response. Note, that the human TNF protein is only able to interact with murine TNFRII (not murine TNFRI).

### Materials and Methods

[0351] The IL-6 targeting Z variant Z06814 (SEQ ID NO:1512) and a control Z variant Z04726 (SEQ ID NO:1535) binding an irrelevant target, were cloned and produced in fusion with the ABD variant PP013 (SEQ ID NO:1554) as described in Example 2. Four groups of Balb/c mice (n=8) were injected subcutaneously (s.c.) with various doses (0, 0.025, 2.5 or 25 mg/kg body weight) of Z06814-ABD 9 h prior to intraperitoneal (i.p.) administration of hIL-6 at 5 μg/kg (R&D Systems). A fifth group of mice (n=8) received 25 mg/kg of Z04726-ABD. Two additional control groups of mice received PBS (n=4) and 25 mg/kg of Z06814-ABD (n=8), respectively, but no subsequent IL-6 injection. After 20 h, the blood was taken by cardiac puncture and serum was collected.

[0352] Serum was assessed for the content of murine SAA by ELISA (Tridelta) according to the manufacturer's instructions. In brief, diluted serum samples were added to SAA-precoated plates together with anti-SAA-HRP. The plates were incubated for 1 h and then washed four times. TMB substrate was added for 20 min and the reaction was stopped with stop solution. The absorbance was measured at 450 nm using a microplate reader (Victor³, Perkin Elmer).

### Results

[0353] The anti-arthritic efficacy of the Z variant Z06814 (SEQ ID NO:1512) was assessed in vivo using a mouse model for IL-6 triggered serum amyloid-A (SAA) protein release. Four groups of mice were given 0, 0.025, 2.5 or 25 mg/kg body weight of the IL-6 binding Z06814-ABD fusion protein or 25 mg/kg of a control Z04726-ABD fusion protein 9 h before an injection of 5 μg/kg body weight of hIL-6. After an additional 22 h, the levels of SAA protein were measured and compared between the different groups. In animals receiving either no Z06814-ABD or 25 mg/kg of the control Z04726-ABD fusion, SAA protein levels in serum increased to levels of approximately 500-600 μg/ml. Control animals given PBS only (and no hIL-6) exhibited levels in the range of 16-64 μg/ml. In animals given Z06814-ABD, significantly lower SAA protein levels were measured in a dose-dependent manner (FIG. 7). For the group given the highest dose of Z06814-ABD (25 mg/kg body weight), SAA protein levels were as low as for animals given no hIL-6 injection.

### Example 9

### Production of Complexes and Control Polypeptides

### Materials and Methods

[0354] Production of Antibodies and Complexes:

[0355] Four different complexes targeting IL-6 and TNF were constructed, as well as an antibody with affinity for TNF. An antibody denoted “Ada”, having the same CDR sequences and specificity as the commercially available monoclonal antibody adalimumab, was constructed using the heavy chain (HC) and light chain (LC) sequences HC_{Ada} (SEQ ID NO:1557) and LC_{Ada} (SEQ ID NO:1558). The IL-6 targeting Z variant Z06814 (SEQ ID NO:1512) moiety, but starting with the amino acid residues AE instead of VD and with the additional C-terminal amino acid residues VD, was genetically fused, via a flexible 15 residue (GGGGS)₃ linker, to the N-termini of HC_{Ada} or LC_{Ada}, resulting in the complexes denoted Z06814-HC_{Ada} and Z06814-LC_{Ada}, respectively, or to the C-termini of the same chains, resulting in the complexes HC_{Ada}-Z06814 and LC_{Ada}-Z06814, respectively. Gene synthesis, cloning, production by transient gene expression in CHO cells and purification using Protein A affinity chromatography was performed by Evitria AG (Switzerland). The purity of the complexes and of Ada was analyzed by SDS-PAGE under both non-reduced and reduced conditions. 15 μg of each variant was loaded on a 12-well 4-12% NuPAGE® gel (Life Technologies).

[0356] Production of Control Polypeptides:

[0357] A subcloning strategy for construction of the IL-6 binding Z variant Z06814 (SEQ ID NO:1512) and a Z variant binding an irrelevant target, Z04726 (SEQ ID NO:1553), with an N-terminal His₆ tag, was applied using standard molecular biology techniques (essentially as described in detail in WO2009/077175 for Z variants binding another target). The Z gene fragment was subcloned into the expression vector pAY01448, resulting in the encoded sequence MGSSHHHHHHLQ-[Z#####]-VD.

[0358] Z06814 was also subcloned in fusion with the albumin binding domain variant PP013 (SEQ ID NO:1554). The construct encoded by the expression vector was MGSSLQ-[Z#####]-VDGS-PP013.

[0359] E. coli BL21(DE3) cells (Novagen) were transformed with plasmids containing the gene fragments of each respective Z variant, cultivated at 37° C. in TSB-YE medium supplemented with 50 μg/ml kanamycin. Protein expression was induced with IPTG. Pelleted cells were disrupted by sonication and the cell debris was removed by centrifugation. Each supernatant containing His₆ tagged protein or ABD fused protein was purified by affinity chromatography using GraviTrap IMAC column (GE Healthcare, cat. no. 11-0033-99) or anti-ABD agarose (WO2014064237), respectively. The ABD fused Z variant was also purified on a 1 ml Detoxi-Gel Endotoxin Removing Column (Pierce, cat.no. 20344). Next, buffer was exchanged to PBS (10 mM phosphate, 137 mM NaCl, 2.68 mM KCl, pH 7.4) for the purified Z variants. The purity of each sample was analyzed by SDS-PAGE stained with Coomassie Blue and the identity of each purified control Z variant was confirmed using LC/MS analysis.

### Results

[0360] Production of Complex Constructs:

[0361] A schematic representation of the design of each of the four different produced complexes is shown in FIG. 8. Analysis by SDS-PAGE under non-reduced conditions of samples containing produced constructs showed that they were of high purity. SDS-PAGE analysis under reduced conditions confirmed the expected size of the individual subunits in concordance with the site of the fusion of the Z variant to the antibody chain (FIG. 9).

[0362] Production of Control Polypeptides:

[0363] The control polypeptides, constructed with an N-terminal His₆-tag or with a C-terminal ABD variant PP013, were produced in E. coli. SDS-PAGE analysis of each final protein preparation showed a high purity, and the correct identity and molecular weight of each control Z variant were confirmed by HPLC-MS analysis.

### Example 10

### Affinity Determinations of Complexes Binding to IL-6 and TNF

### Materials and Methods

[0364] 10 μg/ml solutions of each of the complexes Z06814-HC_{Ada} and LC_{Ada}-Z06814, as well as of Ada and His₆-Z06814, i.e. each of the fusion partners alone, were prepared in 10 mM NaAc pH 4.5 buffer and used for immobilization of the proteins on a Proteon GLC chip (Bio-Rad) via amine coupling chemistry. Immobilization levels obtained were ˜1400-2000 RU for the two complexes and Ada, and 100-200 RU for His₆-Z06814. A series of 50 nM, 10 nM, 2 nM, 0.4 nM and 0.08 nM concentrations of rhIL-6 (R&D Systems) was injected and the responses recorded. This experiment was repeated three times.

[0365] In separate triplicate experiments, TNF (R&D Systems) was injected using the same concentration series. In all cases, the duration of the injection was 3 min at a flow rate of 60 μl/min and the dissociation time was 30 min. Buffer response levels obtained for activated/deactivated spots or in between spots areas were subtracted according to the manufacturer's instructions. The data was analyzed using Bio-Rad Manager Software (BioRad).

### Results

[0366] The affinity to the two target proteins IL-6 and TNF were determined for the complexes Z06814-HC_{Ada} and LC_{Ada}-Z06814, as well as of the individual subunits Ada and Z06814 alone. The kinetic parameters ((K_{D}, kₐ (kₒₙ) and k_{d} (k_{off})) for the interactions with IL-6 and TNF are summarized in Table 16 and 17, respectively.

TABLE 16
Kinetic parameters for binding of IL-6 to the indicated polypeptides.
Values shown are the average of three measurements ± standard deviation

| Polypeptide | kₒₙ (M⁻¹s⁻¹) | k_{off} (s⁻¹) | K_{D} (M) |
|---|---|---|---|
| Z06814-HC_{Ada} | 3.2 × 10⁵ ± 2.1 × 10³ | 2.3 × 10⁻⁴ ± 2.8 × 10⁻⁵ | 7.2 × 10⁻¹⁰ ± 8.4 × 10⁻¹¹ |
| LC_{Ada}-Z06814 | 1.4 × 10⁵ ± 2.6 × 10³ | 1.3 × 10⁻⁴ ± 1.6 × 10⁻⁵ | 9.3 × 10⁻¹⁰ ± 1.2 × 10⁻¹⁰ |
| His₆-Z06814 | 3.1 × 10⁵ ± 4.5 × 10³ | 1.5 × 10⁻⁴ ± 1.2 × 10⁻⁵ | 5.0 × 10⁻¹⁰ ± 3.4 × 10⁻¹¹ |

TABLE 17
Kinetic parameters for binding of TNF to the indicated polypeptides.
Values shown are the average of three measurements ± standard deviation

| Polypeptide | kₒₙ (M⁻¹s⁻¹) | k_{off} (s⁻¹) | K_{D} (M) |
|---|---|---|---|
| Z06814-HC_{Ada} | 6.2 × 10⁵ ± 4.2 × 10³ | 1.1 × 10⁻⁴ ± 0 | 1.7 × 10⁻¹⁰ ± 1.7 × 10⁻¹² |
| LC_{Ada}-Z06814 | 8.4 × 10⁵ ± 4.8 × 10³ | 1.1 × 10⁻⁴ ± 1.9 × 10⁻⁶ | 1.3 × 10⁻¹⁰ ± 2.8 × 10⁻¹² |
| Ada | 7.4 × 10⁵ ± 5.6 × 10³ | 1.6 × 10⁻⁴ ± 8.2 × 10⁻⁷ | 2.2 × 10⁻¹⁰ ± 8.2 × 10⁻¹³ |

[0367] The dissociation constant K_{D} for the interaction of TNF with the produced Ada construct was determined to be 220 pM. For the Z06814-HC_{Ada} and LC_{Ada}-Z06814 complexes, the observed K_{D} values for TNF were 170 pM and 130 pM, respectively. This indicates that fusion of the Z variant to the antibody Ada did not negatively affect the antibody's affinity for TNF; rather, somewhat higher affinities were observed. When analyzed for binding to IL-6, the affinity of the complexes Z06814-HC_{Ada} and LC_{Ada}-Z06814 differed only marginally from the affinity of His₆-Z06814 alone.

### Example 11

### Analysis of Biological Activity In Vitro

[0368] The potency of the four different complex variants constructed and produced as described in Example 9 was determined using a TF-1 cell assay, evaluating the classical signaling pathway. The TF-1 cell line proliferates in response to human IL-6, TNF and GM-CSF. This direct signaling of IL-6 to cell surface IL-6 receptor, in conjunction with a signaling receptor sub-unit called gp130, is termed cis-signaling. TF-1 cells were stimulated with either IL-6 or TNF alone or with both in combination.

### Materials and Methods

[0369] TF-1 cells were cultured in RPMI1640 with L-glut (Lonza) supplemented with 10% FCS (Gibco), Pen-Strep (Lonza) and 2 ng/ml rhGM-CSF (R&D Systems). Prior to use, the cells were washed twice in RPMI1640 in the absence of rhGM-CSF. Cells were then counted and dispensed into 96 well flat bottomed plates at a density of 4×10⁴ cells per well. In separate plates, serial dilutions (ranging either from 400-0.004 nM or 10-0.00001 nM) of the complexes Z06814-HC_{Ada}, Z06814-LC_{Ada}, HC_{Ada}-Z06814 and LC_{Ada}-Z06814; the negative control polypeptide Z04726 (SEQ ID NO:1553) with an N-terminal His₆-tag; the positive control polypeptides Z06814-ABD and Ada, and a mixture of Ada and Z06814-ABD were prepared. The samples were incubated in the presence of either 0.099 nM rhIL-6 (R&D Systems, cat. no. 206-IL/CF), 0.023 nM rhTNF (R&D Systems, cat. no. 210-TA) or a combination of both cytokines. The pre-mixtures were transferred to wells containing TF-1 cells which were incubated for 72 h at 37° C. in a humidified 5% CO₂ atmosphere. During the last four hours of incubation, 10 μl of CCK-8 (Fluka, Sigma Aldrich) was added per well to determine the number of proliferating cells. The absorbance was measured at 450 nm (Abs450) using a microplate reader (Victor³, Perkin Elmer). The data on cell growth was assessed by non-linear regression to a four-parameter dose-response curve, and the half maximal inhibitory concentration (IC50) was determined using GraphPadPrism program. The inhibition of IL-6/TNF-dependent proliferation of TF-1 cells by the inhibitory molecules was as Abs450 minus control wells that contained cells but no IL-6.

### Results

[0370] In a first set of experiments, the capacity of the four different complexes Z06814-HC_{Ada}, Z06814-LC_{Ada}, HC_{Ada}-Z06814 and LC_{Ada}-Z06814 to block either the hIL-6- or TNF-dependent growth of TF-1 cells was tested. As controls, Ada and Z06814-ABD alone were included. In the IL-6 blocking test, all four complexes, as well as the Z06814-ABD construct, showed growth inhibition capability with IC50 values estimated in the range from 0.1 to 1 nM. As expected, the TNF targeting Ada did not show any effect in this assay (FIG. 10A).

[0371] In the experiment where TNF was used to stimulate the cells, all four Ada-based complexes, as well as Ada itself, showed effective blocking of the growth-stimulating TNF signal, all with IC50 values around 10 pM (FIG. 10B). As expected, Z06814-ABD, targeting IL-6 but not TNF, did not show any effect in this assay.

[0372] In a second set of experiments, TF-1 cells were simultaneously stimulated with both IL-6 and TNF. The blocking effect of each of the four different complexes was investigated and compared to Ada, Z06814-ABD and a mixture of 1:2 (i.e. equimolar concentrations with respect to number of binding moieties) of Ada and Z06814-ABD. The result showed that all four complexes inhibited TF1 cell proliferation better than either Ada or Z06814-ABD alone (FIG. 10C). When added individually, both Ada and Z06814-ABD showed growth inhibiting effects reaching 50% viability values at the highest concentrations, suggesting that approximately equal cell growth stimulating effects were coming from IL-6 and TNF. When a mixture of 1:2 of Ada and Z06814-ABD was added, complete blocking of cell growth could be observed, suggesting a co-operative blocking effect. The same effect was observed for the Z06814-HC_{Ada} complex, indicating that both its components were functional and that they could independently inhibit TF-1 cell proliferation. No effect was seen with the negative control Z variant, His₆-Z04726, binding an irrelevant target (FIG. 10C).

### Example 12

### Analysis of Biological Activity In Vivo

[0373] A Serum Amyloid A (SAA) mouse model was used to study the inflammation blocking effect of Z06814-HC_{Ada} in vivo. The acute phase protein SAA is secreted from liver cells and can be induced by the pro-inflammatory cytokines IL-1, IL-6 and TNF. Due to high sequence homology between the human and mouse cytokines, the human variants are able to act on their corresponding mouse receptors and induce a murine SAA response. However, the human TNF protein can only interact with murine TNF Receptor II (TNFRII), and not with not murine TNF Receptor I (TNFRI).

### Materials and Methods

[0374] Seven groups of Balb/c mice (n=6) were injected intraperitoneally (i.p.) with 70, 7, 0.7 or 0 (vehicle) mg/kg of Z06814-HC_{Ada} or of Ada. The injections were performed 9 h prior to i.p. administration with a mixture of rhIL-6 and rhTNF, each dosed at 2.5 μg/kg. After 16 h, blood was taken by orbital puncture and serum was collected. Collected serum was assessed for the content of murine SAA by ELISA (Tridelta, cat. no. KMA0021) according to the manufacturer's instructions. In brief, diluted serum samples were added together with anti-SAA-HRP to plates pre-coated with SAA. The plates were incubated for 1 h and then washed four times. TMB substrate was added and the reaction was stopped with stop solution after 20 min. The absorbance was measured at 450 nm using a microplate reader (Victor³, Perkin Elmer).

### Results

[0375] The anti-arthritic efficacy of Z06814-HC_{Ada} was assessed in vivo using a mouse model for IL-6 triggered serum amyloid-A (SAA) protein release. The results show that while a high dose (70 mg/kg) of the TNF blocking antibody Ada alone resulted in only a 50% decrease in observed serum SAA levels, the same dose of Z06814-HC_{Ada} reduced the serum SAA levels to concentrations lower than the limit of quantitation (LOQ) of the test kit used (FIG. 11). This suggests that the combination of the IL-6 signaling blocking polypeptide Z06814 and the TNF blocking Ada antibody in one molecule resulted in a complex capable of dual action and thus of giving therapeutic relief to both the IL-6 and the TNF challenges.

### Example 13

### Production and Binding Activity of Matured Complexes Targeting IL-6 and TNF

### Materials and Methods

[0376] Production of Complex Targeting IL-6 and TNF:

[0377] Three different complexes targeting IL-6 and TNF were constructed. An antibody denoted “Ada2”, having the same CDR sequences and specificity as the commercially available monoclonal antibody adalimumab, was constructed using the heavy chain (HC) and light chain (LC) sequences HC2_{Ada} (SEQ ID NO:1559) and LC_{Ada} (SEQ ID NO:1558). The IL-6 targeting Z variant Z14976 (SEQ ID NO:1) moiety, but starting with the amino acid residues AE instead of VD, was genetically fused via a flexible 5 residue (GGGGS) or 15 residue (GGGGS)₃ linker to the N-termini of LC_{Ada}, resulting in complexes denoted Z14976-(GGGGS)-LC_{Ada} and Z14976-(GGGGS)₃-LC_{Ada}, respectively, or via a flexible 5 residue (GGGGS) linker to the C-termini of LC_{Ada}, resulting in the complex denoted LC_{Ada}-(GGGGS)-Z14976. The heavy chain and Z variant-fused light chain constructs were cloned into pcDNA3.1 (Invitrogen) or pOptiVEC (Invitrogen), respectively. The IL-6 and TNF targeting complexes were produced using the CHO-S system (Invitrogen) and purified using Protein A chromatography (GE Healthcare, cat. no. 17-1279-01). The purity of the complexes was analyzed by SDS-PAGE under both non-reduced (6 acrylamide gel) and reduced conditions (12% acrylamide gel).

[0378] ELISA Binding Activity:

[0379] The binding of TNF and IL-6 targeting complexes was analyzed in an ELISA assay. Half-area 96-well ELISA plates were directly coated at 4° C. overnight with 0.5 μg/ml of TNF or IL-6 in PBS buffer and the wells were blocked with 100 μl of 3% skim milk/PBS (137 mM NaCl, 2.7 mM KCl, 10 mM Na₂HPO₄, 1.8 mM KH₂PO₄) for 1 h at RT. Next, 30 μl of serially diluted complexes and control antibodies from a starting concentration of 1 μg/ml in 3% skim milk/PBS were added to each well. The plates were incubated for 2 h at RT followed by washing four times with PBST 0.05%. HRP conjugated anti-human IgG Fc secondary antibody (Pierce, cat. no. 31423) was diluted 1:5000 in 3% skim milk/PBS and added to the wells followed by 1 h incubation. After washing as described above, 30 μl ImmunoPure TMB substrate (Pierce, cat. no. 34014) was added to the wells and the plates were treated according to the manufacturer's recommendations. Adalimumab (Abbvie, LOT4435XH04) was used as a positive control for the TNF binding activity and as a negative control for the IL-6 binding activity. Furthermore, an irrelevant IgG (Jackson Immunoresearch, cat. no. Jac-009-000-003) was included as a negative control in both assays.

### Results

[0380] Production of Complex Targeting IL-6 and TNF:

[0381] SDS page analyses of purified complexes under non-reduced and reduced conditions are shown in FIG. 12. Analysis performed under reduced conditions (FIG. 12B) confirmed the expected size of the individual subunits.

[0382] ELISA Binding Activity:

[0383] The result of the ELISA binding analyses confirmed retained binding to TNF for all tested complexes, i.e. Z14976-(GGGGS)-LC_{Ada}, Z14976-(GGGGS)₃-LC_{Ada} and LC_{Ada}-(GGGGS)-Z14976 (FIG. 13A). IL-6 binding was retained for the complexes Z14976-(GGGGS)-LC_{Ada} and Z14976-(GGGGS)₃-LC_{Ada} but not for LC_{Ada}-(GGGGS)-Z14976 (FIG. 13B). The approximate calculated EC50 values for each respective interaction are shown in Table 18.

TABLE 18
Approximate EC50 values for interaction with TNF and IL-6

EC50 (M)

| Polypeptide | TNF binding | IL-6 binding |
|---|---|---|
| Z14976-(GGGGS)-LC_{Ada} | 9.4 × 10⁻¹¹ | 5.6 × 10⁻¹⁰ |
| Z14976-(GGGGS)₃-LC_{Ada} | 1.2 × 10⁻¹⁰ | 9.5 × 10⁻¹⁰ |
| LC_{Ada}-(GGGGS)-Z14976 | 1.7 × 10⁻¹⁰ | — |
| Adalimumab | 7.7 × 10⁻¹¹ | N/A |

### Itemized List of Embodiments

[0384] 1. Complex comprising at least one IL-6 binding polypeptide and at least one antibody or an antigen binding fragment thereof, wherein said IL-6 binding polypeptide comprises an IL-6 binding motif BM, which motif consists of an amino acid sequence selected from:
[0385] i) EEX₃X₄AWX₇EIHX₁₁LPNLX₁₆X₁₇X₁₈QX₂₀X₂₁AFIX₂₅X₂₆LX₂₈X₂₉
   wherein, independently from each other,

[0386] X₃ is selected from A, F, H, K, Q, R, S, W and Y;

[0387] X₄ is selected from A, D, E, F, H, I, K, L, M, N, Q, R, S, T, V and Y;

[0388] X₇ is selected from F, H, I, K, L, M, N, R, S, T, V, W and Y;

[0389] X₁₁ is selected from A, I, K, L, M, N, R, S, T and V;

[0390] X₁₆ is selected from N and T;

[0391] X₁₇ is selected from A, I, T and V;

[0392] X₁₈ is selected from D, E, G, H, K, N, Q, R, S and T;

[0393] X₂₀ is selected from I, L, M, R, T and V;

[0394] X₂₁ is selected from A, S, T and V;

[0395] X₂₅ is selected from I, M, Q, S, T, V and W;

[0396] X₂₆ is selected from K and S;

[0397] X₂₈ is selected from F, L, M and Y; and

[0398] X₂₉ is selected from D and R;

and
[0399] ii) an amino acid sequence which has at least 93% identity to the sequence defined in i).

[0400] 2. Complex according to item 1, wherein in sequence i):

[0401] X₃ is selected from A, H, K, Q, R and Y;

[0402] X₄ is selected from A, D, E, F, H, I, K, L, M, N, Q, R, S, T, V and Y;

[0403] X₇ is selected from F, H, I, K, L, M, N, R, T, V, W and Y;

[0404] X₁₁ is selected from A, I, K, L, N, S, T and V;

[0405] X₁₆ is T;

[0406] X₁₇ is selected from A, I, T and V;

[0407] X₁₈ is selected from D, E, H, K, N, Q, R, S and T;

[0408] X₂₀ is selected from I, L, M, R and V;

[0409] X₂₁ is selected from A, S and V;

[0410] X₂₅ is selected from I, Q, S, T, V and W;

[0411] X₂₆ is K;

[0412] X₂₈ is selected from F, L, M and Y; and

[0413] X₂₉ is D.

[0414] 3. Complex according to item 1 or 2, wherein sequence i) fulfills at least six of the eleven conditions I-XI:
[0415] I. X₃ is selected from K and R;
[0416] II. X₁₁ is selected from A and L;
[0417] III. X₁₆ is T;
[0418] IV. X₁₇ is selected from I and V;
[0419] V. X₁₈ is selected from D and E;
[0420] VI. X₂₀ is M;
[0421] VII. X₂₁ is A;
[0422] VIII. X₂₅ is selected from S and T;
[0423] IX. X₂₆ is K;
[0424] X. X₂₈ is F; and
[0425] XI. X₂₉ is D.

[0426] 4. Complex according to item 3, wherein sequence i) fulfills at least seven of the eleven conditions I-XI.

[0427] 5. Complex according to item 4, wherein sequence i) fulfills at least eight of the eleven conditions I-XI.

[0428] 6. Complex according to item 5, wherein sequence i) fulfills at least nine of the eleven conditions I-XI.

[0429] 7. Complex according to item 6, wherein sequence i) fulfills at least ten of the eleven conditions I-XI.

[0430] 8. Complex according to item 7, wherein sequence i) fulfills all of the eleven conditions I-XI.

[0431] 9. Complex according to any preceding item, wherein X₁₇X₂₀X₂₁ is selected from VMA and IMA.

[0432] 10. Complex according to any one of items 1-8, wherein X₂₀X₂₁X₂₈ is MAF.

[0433] 11. Complex according to any one of items 1-8, wherein X₁₇X₂₀X₂₈ is selected from VMF and IMF.

[0434] 12. Complex according to any one of items 1-8, wherein X₁₇X₂₁X₂₈ is selected from VAF and IAF.

[0435] 13. Complex according to any preceding item, wherein sequence i) corresponds to the sequence from position 8 to position 36 in a sequence selected from the group consisting of SEQ ID NO:1-1551.

[0436] 14. Complex according to item 13, wherein sequence i) corresponds to the sequence from position 8 to position 36 in a sequence selected from the group consisting of SEQ ID NO:1-1502.

[0437] 15. Complex according to item 14, wherein sequence i) corresponds to the sequence from position 8 to position 36 in a sequence selected from the group consisting of SEQ ID NO:7, SEQ ID NO:15-89 and SEQ ID NO:151-871.

[0438] 16. Complex according to item 14, wherein sequence i) corresponds to the sequence from position 8 to position 36 in a sequence selected from the group consisting of SEQ ID NO:1-6, SEQ ID NO:8-14, SEQ ID NO:90-150 and SEQ ID NO:872-1502.

[0439] 17. Complex according to item 13, wherein sequence i) corresponds to the sequence from position 8 to position 36 in a sequence selected from the group consisting of SEQ ID NO:1-152 and SEQ ID NO:1503-1515.

[0440] 18. Complex according to item 17, wherein sequence i) corresponds to the sequence from position 8 to position 36 in a sequence selected from the group consisting of SEQ ID NO:1-150 and SEQ ID NO:1503-1515.

[0441] 19. Complex according to item 17, wherein sequence i) corresponds to the sequence from position 8 to position 36 in a sequence selected from the group consisting of SEQ ID NO:1-152.

[0442] 20. Complex according to item 18 or 19, wherein sequence i) corresponds to the sequence from position 8 to position 36 in a sequence selected from the group consisting of SEQ ID NO:1-150.

[0443] 21. Complex according to item 19, wherein sequence i) corresponds to the sequence from position 8 to position 36 in a sequence selected from the group consisting of SEQ ID NO:7, SEQ ID NO:15-89 and SEQ ID NO:151-152.

[0444] 22. Complex according to item 20, wherein sequence i) corresponds to the sequence from position 8 to position 36 in a sequence selected from the group consisting of SEQ ID NO:1-6, SEQ ID NO:8-14 and SEQ ID NO:90-150.

[0445] 23. Complex according to item 18, wherein sequence i) corresponds to the sequence from position 8 to position 36 in a sequence selected from the group consisting of SEQ ID NO:1-14 and SEQ ID NO:1503-1515.

[0446] 24. Complex according to item 23, wherein sequence i) corresponds to the sequence from position 8 to position 36 in a sequence selected from the group consisting of SEQ ID NO:1-14 and SEQ ID NO:1512.

[0447] 25. Complex according to item 24, wherein sequence i) corresponds to the sequence from position 8 to position 36 in a sequence selected from the group consisting of SEQ ID NO:1-14.

[0448] 26. Complex according to any one of items 16, 22 and 25, wherein sequence i) corresponds to the sequence from position 8 to position 36 in a sequence selected from the group consisting of SEQ ID NO:1-5.

[0449] 27. Complex according to item 24, wherein sequence i) wherein sequence i) corresponds to the sequence from position 8 to position 36 in SEQ ID NO:1512.

[0450] 28. Complex according to any preceding item, wherein said IL-6 binding motif forms part of a three-helix bundle protein domain.

[0451] 29. Complex according to item 28, wherein said IL-6 binding motif essentially forms part of two helices with an interconnecting loop, within said three-helix bundle protein domain.

[0452] 30. Complex according to item 29, wherein said three-helix bundle protein domain is selected from bacterial receptor domains.

[0453] 31. Complex according to item 30, wherein said three-helix bundle protein domain is selected from domains of protein A from Staphylococcus aureus or derivatives thereof.

[0454] 32. Complex according to any preceding item, wherein said IL-6 binding polypeptide comprises a binding module BMod, the amino acid sequence of which is selected from:

iii)
K-[BM]-DPSQSXₐX_{b}LLX_{c}EAKKLX_{d}XₑX_{f}Q;

wherein
[0455] [BM] is an IL-6 binding motif as defined in any one of items 1-27 provided that X₂₉ is D;
[0456] Xₐ is selected from A and S;
[0457] X_{b} is selected from N and E;
[0458] X_{c} is selected from A, S and C;
[0459] X_{d} is selected from E, N and S;
[0460] Xₑ is selected from D, E and S;
[0461] X_{f} is selected from A and S; and
[0462] iv) an amino acid sequence which has at least 91% identity to a sequence defined by iii).

[0463] 33. Complex according to any one of items 1-31, wherein said IL-6 binding polypeptide comprises a binding module BMod, the amino acid sequence of which is selected from:

v)
K-[BM]-QPEQSXₐX_{b}LLX_{c}EAKKLX_{d}XₑX_{f}Q,

wherein
[0464] [BM] is an IL-6 binding motif as defined in any one of items 1-27 provided that X₂₉ is R;
[0465] Xₐ is selected from A and S;
[0466] X_{b} is selected from N and E;
[0467] X_{c} is selected from A, S and C;
[0468] X_{d} is selected from E, N and S;
[0469] Xₑ is selected from D, E and S;
[0470] X_{f} is selected from A and S; and
[0471] vi) an amino acid sequence which has at least 91% identity to a sequence defined by v).

[0472] 34. Complex according to any one of items 1-32, wherein sequence iii) corresponds to the sequence from position 7 to position 55 in a sequence selected from the group consisting of SEQ ID NO:1-1551.

[0473] 35. Complex according to item 34, wherein sequence iii) corresponds to the sequence from position 7 to position 55 in a sequence selected from the group consisting of SEQ ID NO:1-1502.

[0474] 36. Complex according to item 35, wherein sequence iii) corresponds to the sequence from position 7 to position 55 in a sequence selected from the group consisting of SEQ ID NO:7, SEQ ID NO:15-89 and SEQ ID NO:151-871.

[0475] 37. Complex according to item 35, wherein sequence iii) corresponds to the sequence from position 7 to position 55 in a sequence selected from the group consisting of SEQ ID NO:1-6, SEQ ID NO:8-14, SEQ ID NO:90-150 and SEQ ID NO:872-1502.

[0476] 38. Complex according to item 34, wherein sequence iii) corresponds to the sequence from position 7 to position 55 in a sequence selected from the group consisting of SEQ ID NO:1-152 and SEQ ID NO:1503-1515.

[0477] 39. Complex according to item 38, wherein sequence iii) corresponds to the sequence from position 7 to position 55 in a sequence selected from the group consisting of SEQ ID NO:1-150 and SEQ ID NO:1503-1515.

[0478] 40. Complex according to item 35 or 38, wherein sequence iii) corresponds to the sequence from position 7 to position 55 in a sequence selected from the group consisting of SEQ ID NO:1-152.

[0479] 41. Complex according to item 39 or 40, wherein sequence iii) corresponds to the sequence from position 7 to position 55 in a sequence selected from the group consisting of SEQ ID NO:1-150.

[0480] 42. Complex according to item 40, wherein sequence iii) corresponds to the sequence from position 7 to position 55 in a sequence selected from the group consisting of SEQ ID NO:7, SEQ ID NO:15-89 and SEQ ID NO:151-152.

[0481] 43. Complex according to item 41, wherein sequence iii) corresponds to the sequence from position 7 to position 55 in a sequence selected from the group consisting of SEQ ID NO:1-6, SEQ ID NO:8-14 and SEQ ID NO:90-150.

[0482] 44. Complex according to item 39, wherein sequence iii) corresponds to the sequence from position 7 to position 55 in a sequence selected from the group consisting of SEQ ID NO:1-14 and SEQ ID NO:1503-1515.

[0483] 45. Complex according to item 44, wherein sequence iii) corresponds to the sequence from position 7 to position 55 in a sequence selected from the group consisting of SEQ ID NO:1-14 and SEQ ID NO:1512.

[0484] 46. Complex according to item 45, wherein sequence iii) corresponds to the sequence from position 7 to position 55 in a sequence selected from the group consisting of SEQ ID NO:1-14.

[0485] 47. Complex according to any one of items 36, 42 and 46, wherein sequence iii) corresponds to the sequence from position 7 to position 55 in a sequence selected from the group consisting of SEQ ID NO:1-5.

[0486] 48. Complex according to item 45, wherein sequence iii) corresponds to the sequence from position 7 to position 55 in SEQ ID NO:1512.

[0487] 49. Complex according to any preceding item, wherein said IL-6 binding polypeptide comprises an amino acid sequence selected from:
[0488] vii) YA-[BMod]-AP;
[0489] wherein [BMod] is an IL-6 binding module as defined in any one of items 32-48; and
[0490] viii) an amino acid sequence which has at least 90% identity to a sequence defined by vii).

[0491] 50. Complex according to any one of items 1-48, wherein said IL-6 binding polypeptide comprises an amino acid sequence selected from:
[0492] ix) FN-[BMod]-AP;
[0493] wherein [BMod] is an IL-6 binding module as defined in any one of items 32-48; and
[0494] x) an amino acid sequence which has at least 90% identity to a sequence defined by ix).

[0495] 51. Complex according to any preceding item, which comprises an amino acid sequence selected from:

ADNNFNK-[BM]-DPSQSANLLSEAKKLNESQAPK;
ADNKFNK-[BM]-DPSQSANLLAEAKKLNDAQAPK;
ADNKFNK-[BM]-DPSVSKEILAEAKKLNDAQAPK;
ADAQQNNFNK-[BM]-DPSQSTNVLGEAKKLNESQAPK;
AQHDE-[BM]-DPSQSANVLGEAQKLNDSQAPK;
VDNKFNK-[BM]-DPSQSANLLAEAKKLNDAQAPK;
AEAKYAK-[BM]-DPSESSELLSEAKKLNKSQAPK;
VDAKYAK-[BM]-DPSQSSELLAEAKKLNDAQAPK;
VDAKYAK-[BM]-DPSQSSELLAEAKKLNDSQAPK;
AEAKYAK-[BM]-DPSQSSELLSEAKKLNDSQAPK;
AEAKYAK-[BM]-DPSQSSELLSEAKKLSESQAPK;
AEAKYAK-[BM]-QPEQSSELLSEAKKLSESQAPK;
AEAKYAK-[BM]-DPSQSSELLSEAKKLESSQAPK;
AEAKYAK-[BM]-QPEQSSELLSEAKKLESSQAPK;
VDAKYAK-[BM]-DPSQSSELLSEAKKLNDSQAPK;
VDAKYAK-[BM]-DPSQSSELLSEAKKLSESQAPK;
VDAKYAK-[BM]-QPEQSSELLSEAKKLSESQAPK;
VDAKYAK-[BM]-DPSQSSELLSEAKKLESSQAPK;
VDAKYAK-[BM]-QPEQSSELLSEAKKLESSQAPK;
VDAKYAK-[BM]-DPSQSSELLAEAKKLNKAQAPK;
and
AEAKYAK-[BM]-DPSQSSELLAEAKKLNKAQAPK;

wherein [BM] is an IL-6 binding motif as defined in any one of items 1-27.

[0496] 52. Complex according to any one of items 1-49, which comprises an amino acid sequence selected from:

xi)
VDAKYAK-[BM]-DPSQSSELLSEAKKLNDSQAPK;

[0497] wherein [BM] is an IL-6 binding motif as defined in any one of items 1-27, and
[0498] xii) an amino acid sequence which has at least 89% identity to the sequence defined in xi).

[0499] 53. Complex according to any one of items 1-49, which comprises an amino acid sequence selected from:

xiii)
AEAKYAK-[BM]-DPSQSSELLSEAKKLNDSQAPK;

[0500] wherein [BM] is an IL-6 binding motif as defined in any one of items 1-27, and
[0501] xiv) an amino acid sequence which has at least 89% identity to the sequence defined in xiii).

[0502] 54. Complex according to item 52, wherein sequence xi) is selected from the group consisting of SEQ ID NO:1-1551.

[0503] 55. Complex according to item 54, wherein sequence xi) is selected from the group consisting of SEQ ID NO:1-1502.

[0504] 56. Complex according to item 55, wherein sequence xi) is selected from the group consisting of SEQ ID NO:7, SEQ ID NO:15-89 and SEQ ID NO:151-871.

[0505] 57. Complex according to item 55, wherein sequence xi) is selected from the group consisting of SEQ ID NO:1-6, SEQ ID NO:8-14, SEQ ID NO:90-150 and SEQ ID NO:872-1502.

[0506] 58. Complex according to item 54, wherein sequence xi) is selected from the group consisting of SEQ ID NO:1-152 and SEQ ID NO:1503-1515.

[0507] 59. Complex according to item 58, wherein sequence xi) is selected from the group consisting of SEQ ID NO:1-150 and SEQ ID NO:1503-1515.

[0508] 60. Complex according to item 55 or 58, wherein sequence xi) is selected from the group consisting of SEQ ID NO:1-152.

[0509] 61. Complex according to item 59 or 60, wherein sequence xi) is selected from the group consisting of SEQ ID NO:1-150.

[0510] 62. Complex according to item 60, wherein sequence xi) is selected from the group consisting of SEQ ID NO:7, SEQ ID NO:15-89 and SEQ ID NO:151-152.

[0511] 63. Complex according to item 61, wherein sequence xi) is selected from the group consisting of SEQ ID NO:1-6, SEQ ID NO:8-14 and SEQ ID NO:90-150.

[0512] 64. Complex according to item 59, wherein sequence xi) is selected from the group consisting of SEQ ID NO:1-14 and SEQ ID NO:1503-1515.

[0513] 65. Complex according to item 64, wherein sequence xi) is selected from the group consisting of SEQ ID NO:1-14 and SEQ ID NO:1512.

[0514] 66. Complex according to item 65, wherein sequence xi) is selected from the group consisting of SEQ ID NO:1-14.

[0515] 67. Complex according to any one of items 57, 63 and 66, wherein sequence xi) is selected from the group consisting of SEQ ID NO:1-5.

[0516] 68. Complex according to item 65, wherein sequence xi) is SEQ ID NO:1512.

[0517] 69. Complex according to any preceding item, which comprises additional amino acids at at least one C-terminal and/or N-terminal end.

[0518] 70. Complex according to item 69, wherein said additional amino acid(s) improve(s) production, purification, stabilization in vivo or in vitro, coupling or detection of the complex.

[0519] 71. Complex according to any preceding item, comprising said IL-6 binding polypeptide in multimeric form, such as comprising at least two IL-6 binding polypeptide monomer units, whose amino acid sequences may be the same or different.

[0520] 72. Complex according to item 71, wherein said IL-6 binding polypeptide monomer units are covalently coupled together.

[0521] 73. Complex according to item 72, wherein the IL-6 binding polypeptide monomer units are in the form of a fusion protein.

[0522] 74. Complex according to item 73, wherein the IL-6 binding polypeptide monomer units are in dimeric form.

[0523] 75. Complex according to any preceding item, wherein said at least one antibody or antigen binding fragment thereof is selected from the group consisting of full-length antibodies, Fab fragments, Fab′ fragments, F(ab′)₂ fragments, Fc fragments, Fv fragments, single chain Fv fragments, (scFv)₂ and domain antibodies.

[0524] 76. Complex according to item 75, wherein said at least one antibody or antigen binding fragment thereof is selected from the group consisting of full-length antibodies, Fab fragments and scFv fragments.

[0525] 77. Complex according to item 76, wherein said at least one antibody or antigen binding fragment thereof is a full-length antibody.

[0526] 78. Complex according to any one of items 75-77, wherein said antibody or antigen binding fragment thereof is a monoclonal antibody or an antigen binding fragment thereof.

[0527] 79. Complex according to any one of items 75-78, wherein said antibody or antigen binding fragment thereof is selected from the group consisting of human antibodies, humanized antibodies and chimeric antibodies, and antigen-binding fragments thereof.

[0528] 80. Complex according to item 79, wherein said antibody or antigen binding fragment thereof is a human or humanized antibody, or an antigen binding fragment thereof.

[0529] 81. Complex according to any preceding item, wherein said antibody or antigen binding fragment thereof has affinity for an antigen, for example an antigen associated with a disease or disorder of the immune system, or an antigen associated with cancer.

[0530] 82. Complex according to item 81, wherein said antigen is selected from the group consisting of angiogenin 2 (Ang-2), vascular endothelial growth factor, tumor necrosis factor, TNFSF11, TNFSF13, TNFSF13B, TNFSF14, TNFSF15, insulin-like growth factor, interleukin 1α, interleukin 1β, interleukin 10, interleukin 17A, interleukin 12, interleukin 23, interleukin 33, granulocyte macrophage colony-stimulating factor, granulocyte colony-stimulating factor, high-mobility group protein B1, lipopolysaccharide, toll-like receptor 4, nerve growth factor, chemokine C-C motif ligand 19, chemokine C-C motif ligand 21, chemokine C-X-C motif ligand 4 and interferon alpha.

[0531] 83. Complex according to item 82, wherein said antigen is selected from the group consisting of interleukin 1β, tumor necrosis factor, granulocyte macrophage colony-stimulating factor, granulocyte colony-stimulating factor, interleukin 12, interleukin 17, interleukin 23, high-mobility group protein B1, lipopolysaccharide and toll-like receptor 4.

[0532] 84. Complex according to any one of items 82-83, wherein said antigen is a cytokine, for example selected from the group consisting of interleukin 1β, tumor necrosis factor, granulocyte macrophage colony-stimulating factor, granulocyte colony-stimulating factor, interleukin 12, interleukin 17 and interleukin 23.

[0533] 85. Complex according to item 84, wherein said antigen is tumor necrosis factor.

[0534] 86. Complex according to item 85, wherein said antibody or antigen binding fragment thereof is selected from the group consisting of adalimumab, infliximab, golimumab and certolizumab pegol and antigen binding fragments thereof, for example a full-length antibody selected from the group consisting of adalimumab, infliximab, golimumab and certolizumab pegol.

[0535] 87. Complex according to item 86, wherein said antibody or antigen binding fragment thereof is adalimumab or an antigen binding fragment thereof, for example full-length adalimumab.

[0536] 88. Complex according to any preceding item, which is capable of blocking IL-6 dependent signaling via the cis-signaling pathway and/or the trans-signaling pathway.

[0537] 89. Complex according to item 88, wherein the half maximal inhibitory concentration of blocking IL-6 signaling is at most 1×10⁻⁶ M, such as at most 1×10⁻⁷ M, such as at most 1×10⁻⁸ M, such as at most 1×10⁻⁹ M, such as at most 1×10⁻¹⁰ M.

[0538] 90. Complex according to any one of items 88-89, which is capable of blocking the interaction of IL-6/IL-6Rα with gp130.

[0539] 91. Complex according to any preceding item, which is capable of binding to IL-6 such that the EC50 value of the interaction is at most 1×10⁻⁷ M, such as at most 1×10⁻⁸ M, such as at most 1×10⁻⁹ M, such as at most 1×10⁻¹⁰ M.

[0540] 92. Complex according to any preceding item, which is capable of binding to IL-6 such that the K_{D} value of the interaction is at most 1×10⁻⁸ M, such as at most 1×10⁻⁹ M, such as at most 1×10⁻¹⁰ M, such as at most 1×10⁻¹¹ M.

[0541] 93. Complex according to any preceding item, which is capable of blocking TNF dependent signaling.

[0542] 94. Complex according to item 93, wherein the half maximal inhibitory concentration (IC50) of blocking TNF dependent signaling is at most 1×10⁻⁷ M, such as at most 1×10⁻⁸ M, such as at most 1×10⁻⁹ M, such as at most 1×10⁻¹⁰ M, such as at most 1×10⁻¹¹ M.

[0543] 95. Complex according to any preceding item, which is capable of binding to TNF such that the K_{D} value of the interaction is at most 1×10⁻⁷ M, such as at most 1×10⁻⁸ M, such as at most 1×10⁻⁹ M, such as at most 1×10⁻¹⁰ M, such as at most 1×10⁻¹¹ M, such as at most 1×10⁻¹² M.

[0544] 96. Complex according to any preceding item, which is a fusion protein or a conjugate.

[0545] 97. Complex according to any preceding item, wherein said IL-6 binding polypeptide is attached to the N-terminus or C-terminus of the heavy chain of said antibody or antigen binding fragment thereof.

[0546] 98. Complex according to any one of items 1-96, wherein said IL-6 binding polypeptide is attached to the N-terminus or C-terminus of the light chain of said antibody or antigen binding fragment thereof.

[0547] 99. Complex according to item 97, wherein said IL-6 binding polypeptide is attached to the N-terminus and/or C-terminus of the light chain and heavy chain of said antibody or antigen binding fragment thereof.

[0548] 100. Complex according to any one of items 96-99, which is a fusion protein.

[0549] 101. Complex according to claim 100, further comprising at least one linker, such as selected from the group consisting of flexible amino acid linkers, rigid amino acid linkers and cleavable amino acid linkers.

[0550] 102. Complex according to claim 101, wherein said linker is arranged between said IL-6 binding polypeptide and said antibody or antigen binding fragment thereof.

[0551] 103. Complex according to claim 102, wherein said linker is a flexible linker comprising amino acid residues selected from the group consisting of glycine, serine and threonine.

[0552] 104. Complex according to claim 103, wherein said linker has a general formula selected from

(GₙSₘ)ₚ and (SₘGₙ)ₚ,

wherein, independently,

[0553] n=1-7,

[0554] m=0-7,

[0555] n+m 8 and

[0556] p=1-7.

[0557] 105. Complex according to claim 104, wherein n=1-5.

[0558] 106. Complex according to any one of claims 104-105, wherein m=0-5.

[0559] 107. Complex according to any one of claims 104-106, wherein p=1-5.

[0560] 108. Complex according to any one of claims 105-107, wherein n=4, m=1 and p=1-4.

[0561] 109. Complex according to claim 108, wherein said flexible linker is (GGGGS)₃ or GGGGS.

[0562] 110. A polynucleotide encoding a polypeptide encoding a fusion protein according to any preceding item.

[0563] 111. Expression vector comprising a polynucleotide according to item 110.

[0564] 112. Host cell comprising an expression vector according to item 111.

[0565] 113. Method of producing a complex according to any one of items 1-109, comprising

[0566] culturing a host cell according to item 112 under conditions permissive of expression of said fusion protein from said expression vector, and

[0567] isolating said polypeptide.

[0568] 114. Composition comprising a complex according to any one of items 1-109 and at least one pharmaceutically acceptable excipient or carrier.

[0569] 115. Composition according to item 114, further comprising at least one additional active agent, for example an agent selected from an immune response modifying agent and an anti-cancer agent.

[0570] 116. Complex according to any one of items 1-109 or a composition according to any one of items 114-115 for oral, topical, intravenous, intraperitoneal, subcutaneous, pulmonary, transdermal, intramuscular, intranasal, buccal, sublingual or suppository administration.

[0571] 117. Complex according to any one of items 1-109 or a composition according to any one of items 114-115 for use as a medicament.

[0572] 118. Complex or composition for use according to item 117, wherein said complex or composition modulates IL-6 function and the function of an additional antigen, for example an antigen associated with a disease or disorder of the immune system in vivo, or an antigen associated with cancer.

[0573] 119. Complex or composition for use according to item 118, wherein said complex or composition modulates IL-6 function and TNF function in vivo.

[0574] 120. Complex or composition for use according to any one of items 117-119 in the treatment of an IL-6 related disorder, such as a disorder related to IL-6 and TNF.

[0575] 121. Complex or composition for use according to item 120, wherein said IL-6 related disorder is selected from the group consisting of autoimmune diseases, inflammatory diseases, cancer and neoplastic diseases, for example an IL-6 related disorder selected from chronic inflammatory diseases and inflammation-induced cancers.

[0576] 122. Complex or composition for use according to item 121, wherein said disorder is selected from the group consisting of rheumatoid arthritis; juvenile rheumatoid arthritis; juvenile idiopathic arthritis; systemic juvenile idiopathic arthritis; vasculitis; psoriatic arthritis; psoriasis; ankylosing spondylitis; chronic inflammatory bowel disease, for example Crohn's disease and ulcerative colitis; Grave's disease; Behçet's disease; uveitis; giant cell arteritis; multiple sclerosis; systemic sclerosis; systemic lupus erythematosus; polymyositis; polymyalgia rheumatic; asthma; chronic obstructive pulmonary disease; relapsing polychondritis; pancreatitis; peritonitis; nephritis; Kawasaki's disease; Sjögren's syndrome and adult Still's disease.

[0577] 123. Complex or composition for use according to item 121, wherein said disorder is cancer or neoplastic disease, such as selected from the group consisting of colitis associated cancer, renal cancer, kidney cancer, prostate cancer, malignant lymphoma, multiple myeloma, Castleman's disease, breast cancer and lung cancer.

[0578] 124. Complex or composition for use according to item 121, wherein said disorder is selected from Alzheimer's disease, HIV, diabetes, sepsis, cachexia, myelodysplastic syndrome (MDS), liver cirrhosis, graft versus host disease, myocardial infarction, endometriosis and osteoporosis.

[0579] 125. Method of treatment of an IL-6 related disorder, comprising administering to a subject in need thereof an effective amount of a complex according to any one of items 1-109 or a composition according to any one of items 114-115.

[0580] 126. Method according to item 125, wherein said disorder is a disorder related to IL-6 and TNF.

[0581] 127. Method according to item 125 or 126, wherein said disorder is selected from autoimmune diseases, inflammatory diseases, cancer and neoplastic diseases, for example an IL-6 related disorder selected from chronic inflammatory diseases and inflammation-induced cancers.

[0582] 128. Method according to item 127, wherein said disorder is selected from the group consisting of rheumatoid arthritis; juvenile rheumatoid arthritis; juvenile idiopathic arthritis; systemic juvenile idiopathic arthritis; vasculitis; psoriatic arthritis; psoriasis; ankylosing spondylitis; chronic inflammatory bowel disease, for example Crohn's disease and ulcerative colitis; Grave's disease; Behçet's disease; uveitis; giant cell arteritis; multiple sclerosis; systemic sclerosis; systemic lupus erythematosus; polymyositis; polymyalgia rheumatic; asthma; chronic obstructive pulmonary disease; relapsing polychondritis; pancreatitis; peritonitis; nephritis; Kawasaki's disease; Sjögren's syndrome and adult Still's disease.

[0583] 129. Method according to item 127, wherein said disorder is cancer or neoplastic disease, such as selected from the group consisting of colitis associated cancer, renal cancer, kidney cancer, prostate cancer, malignant lymphoma, multiple myeloma, Castleman's disease, breast cancer and lung cancer.

[0584] 130. Method according to item 127, wherein said disorder is selected from Alzheimer's disease, HIV, diabetes, sepsis, cachexia, myelodysplastic syndrome (MDS), liver cirrhosis, graft versus host disease, myocardial infarction, endometriosis and osteoporosis.

1. A complex comprising at least one interleukin-6 (IL-6) binding polypeptide and at least one antibody or an antigen binding fragment thereof, wherein said IL-6 binding polypeptide comprises an IL-6 binding motif BM, which motif consists of an amino acid sequence selected from:
i) EEX₃X₄AWX₇EIHX₁₁LPNLX₁₆X₁₇X₁₈QX₂₀X₂₁AFIX₂₅X₂₆LX₂₈X₂₉
wherein, independently from each other,
X₃ is selected from A, F, H, K, Q, R, S, W and Y;
X₄ is selected from A, D, E, F, H, I, K, L, M, N, Q, R, S, T, V and Y;
X₇ is selected from F, H, I, K, L, M, N, R, S, T, V, W and Y;
X₁₁ is selected from A, I, K, L, M, N, R, S, T and V;
X₁₆ is selected from N and T;
X₁₇ is selected from A, I, T and V;
X₁₈ is selected from D, E, G, H, K, N, Q, R, S and T;
X₂₀ is selected from I, L, M, R, T and V;
X₂₁ is selected from A, S, T and V;
X₂₅ is selected from I, M, Q, S, T, V and W;
X₂₆ is selected from K and S;
X₂₈ is selected from F, L, M and Y; and
X₂₉ is selected from D and R;
and
ii) an amino acid sequence which has at least 93% identity to the sequence defined in i).

2. The complex according to claim 1, wherein sequence i) corresponds to the sequence from position 8 to position 36 in a sequence selected from the group consisting of SEQ ID NO:1-1551.

3. The complex according to claim 1, wherein said IL-6 binding motif forms part of a three-helix bundle protein domain.

4. The complex according to claim 1, wherein said IL-6 binding polypeptide comprises a binding module BMod, the amino acid sequence of which is selected from:
iii)
K-[BM]-DPSQSXₐX_{b}LLX_{c}EAKKLX_{d}XₑX_{f}Q;
wherein
[BM] is an IL-6 binding motif as defined in claim 1 provided that
X₂₉ is D;
Xₐ is selected from A and S;
X_{b} is selected from N and E;
X_{c} is selected from A, S and C;
X_{d} is selected from E, N and S;
Xₑ is selected from D, E and S;
X_{f} is selected from A and S; and
iv) an amino acid sequence which has at least 91% identity to a sequence defined by iii).

5. The complex according to claim 1, which comprises an amino acid sequence selected from:
xi)
VDAKYAK-[BM]-DPSQSSELLSEAKKLNDSQAPK;
wherein [BM] is an IL-6 binding motif as defined in claim 1; and
xii) an amino acid sequence which has at least 89% identity to the sequence defined in xi).

6. The complex according to claim 5, wherein sequence xi) is selected from the group consisting of SEQ ID NO:1-1551.

7. The complex according to claim 1, wherein said antibody or antigen binding fragment thereof has affinity for an additional antigen.

8. The complex according to claim 7, wherein said antibody or antigen binding fragment thereof is selected from the group consisting of adalimumab, infliximab, golimumab and certolizumab pegol and antigen binding fragments thereof.

9. The complex according to claim 1, which is capable of blocking IL-6 dependent signaling via the cis-signaling pathway and/or the trans-signaling pathway.

10. The complex according to claim 9, wherein the half maximal inhibitory concentration of blocking IL-6 signaling is at most 1×10⁻⁶ M.

11. The complex according to claim 1, which is capable of binding to IL-6 such that the EC50 value of the interaction is at most 1×10⁻⁷ M, or such that the K_{D} value of the interaction is at most 1×10⁻⁸ M.

12. The complex according to claim 7, which is capable of blocking TNF dependent signaling.

13. The complex according to claim 12, wherein the half maximal inhibitory concentration of blocking TNF dependent signaling is at most 1×10⁻⁷ M.

14. The complex according to claim 7, which is capable of binding to TNF such that the K_{D} value of the interaction is at most 1×10⁻⁷ M.

15. The complex according to claim 1, which is a fusion protein.

16. The complex according to claim 15, further comprising at least one linker.

17. The complex according to claim 16, wherein said linker has a general formula selected from
(GₙSₘ)ₚ and (SₘGₙ)ₚ,
wherein, independently,
n=1-7,
m=0-7,
n+m≦8 and
p=1-7.

18. A polynucleotide encoding a polypeptide encoding a fusion protein according to claim 15.

19. A composition comprising the complex according to claim 1 and at least one pharmaceutically acceptable excipient or carrier.

20. A method of treating an IL-6 related disorder comprising,
administering to a subject in need thereof an effective amount of the complex according to claim 1.

21. The method according to claim 20, wherein said complex modulates IL-6 function and the function of an additional antigen.

22. The method according to claim 20, wherein the IL-6 related disorder is selected from the group consisting of autoimmune diseases, inflammatory diseases, cancer and neoplastic diseases.

23. The method according to claim 22, wherein said disorder is selected from the group consisting of rheumatoid arthritis; juvenile rheumatoid arthritis; juvenile idiopathic arthritis; systemic juvenile idiopathic arthritis; vasculitis; psoriatic arthritis; psoriasis; ankylosing spondylitis; chronic inflammatory bowel disease, for example Crohn's disease and ulcerative colitis; Grave's disease; Behçet's disease; uveitis; giant cell arteritis; multiple sclerosis; systemic sclerosis; systemic lupus erythematosus; polymyositis; polymyalgia rheumatic; asthma; chronic obstructive pulmonary disease; relapsing polychondritis; pancreatitis; peritonitis; nephritis; Kawasaki's disease; Sjögren's syndrome and adult Still's disease.

24. The complex according to claim 2, wherein sequence i) is the sequence from position 8 to position 36 in a sequence selected from the group consisting of SEQ ID NO:1-14 and SEQ ID NO:1512.

25. The complex according to claim 24, wherein sequence i) is the sequence from position 8 to position 36 in SEQ ID NO:1512.

The application's sequence listing, which the Patent Office published only in electronic form, follows.

SEQUENCE LISTING (1564 sequences)

SEQ ID NO: 1 - protein, 58 aa, ARTIFICIAL SEQUENCE
  Engineered IL-6 binding polypeptide
VDAKYAKEERKAWYEIHLLPNLTVEQMAAFITKLFDDPSQSSELLSEAKKLNDSQAPK

SEQ ID NO: 2 - protein, 58 aa, ARTIFICIAL SEQUENCE
  Engineered IL-6 binding polypeptide
VDAKYAKEERDAWWEIHALPNLTVEQMAAFITKLFDDPSQSSELLSEAKKLNDSQAPK

SEQ ID NO: 3 - protein, 58 aa, ARTIFICIAL SEQUENCE
  Engineered IL-6 binding polypeptide
VDAKYAKEERHAWYEIHLLPNLTIDQMAAFISKLFDDPSQSSELLSEAKKLNDSQAPK

SEQ ID NO: 4 - protein, 58 aa, ARTIFICIAL SEQUENCE
  Engineered IL-6 binding polypeptide
VDAKYAKEERKAWIEIHNLPNLTIDQMAAFITKLFDDPSQSSELLSEAKKLNDSQAPK

SEQ ID NO: 5 - protein, 58 aa, ARTIFICIAL SEQUENCE
  Engineered IL-6 binding polypeptide
VDAKYAKEEKQAWREIHLLPNLTIDQMAAFITKLFDDPSQSSELLSEAKKLNDSQAPK

SEQ ID NO: 6 - protein, 58 aa, ARTIFICIAL SEQUENCE
  Engineered IL-6 binding polypeptide
VDAKYAKEEKFAWWEIHKLPNLTVDQVAAFITKLFDDPSQSSELLSEAKKLNDSQAPK

SEQ ID NO: 7 - protein, 58 aa, ARTIFICIAL SEQUENCE
  Engineered IL-6 binding polypeptide
VDAKYAKEEREAWFEIHTLPNLTVSQMAAFISKLFDDPSQSSELLSEAKKLNDSQAPK

SEQ ID NO: 8 - protein, 58 aa, ARTIFICIAL SEQUENCE
  Engineered IL-6 binding polypeptide
VDAKYAKEERHAWFEIHKLPNLTVDQMAAFITKLFDDPSQSSELLSEAKKLNDSQAPK

SEQ ID NO: 9 - protein, 58 aa, ARTIFICIAL SEQUENCE
  Engineered IL-6 binding polypeptide
VDAKYAKEEYLAWNEIHKLPNLTVDQMAAFITKLFDDPSQSSELLSEAKKLNDSQAPK

SEQ ID NO: 10 - protein, 58 aa, ARTIFICIAL SEQUENCE
  Engineered IL-6 binding polypeptide
VDAKYAKEEAAAWREIHLLPNLTIDQMAAFITKLFDDPSQSSELLSEAKKLNDSQAPK

SEQ ID NO: 11 - protein, 58 aa, ARTIFICIAL SEQUENCE
  Engineered IL-6 binding polypeptide
VDAKYAKEEYEAWFEIHALPNLTVEQMAAFITKLFDDPSQSSELLSEAKKLNDSQAPK

SEQ ID NO: 12 - protein, 58 aa, ARTIFICIAL SEQUENCE
  Engineered IL-6 binding polypeptide
VDAKYAKEERRAWTEIHSLPNLTIDQMAAFITKLFDDPSQSSELLSEAKKLNDSQAPK

SEQ ID NO: 13 - protein, 58 aa, ARTIFICIAL SEQUENCE
  Engineered IL-6 binding polypeptide
VDAKYAKEERNAWYEIHLLPNLTVEQMAAFITKLFDDPSQSSELLSEAKKLNDSQAPK

SEQ ID NO: 14 - protein, 58 aa, ARTIFICIAL SEQUENCE
  Engineered IL-6 binding polypeptide
VDAKYAKEERMAWYEIHSLPNLTVDQMAAFITKLFDDPSQSSELLSEAKKLNDSQAPK

SEQ ID NO: 15 - protein, 58 aa, ARTIFICIAL SEQUENCE
  Engineered IL-6 binding polypeptide
VDAKYAKEEREAWYEIHVLPNLTVSQIAAFISKLFDDPSQSSELLSEAKKLNDSQAPK

SEQ ID NO: 16 - protein, 58 aa, ARTIFICIAL SEQUENCE
  Engineered IL-6 binding polypeptide
VDAKYAKEERTAWFEIHTLPNLTVEQMAAFISKLFDDPSQSSELLSEAKKLNDSQAPK

SEQ ID NO: 17 - protein, 58 aa, ARTIFICIAL SEQUENCE
  Engineered IL-6 binding polypeptide
VDAKYAKEEAEAWWEIHLLPNLTVSQMAAFISKLFDDPSQSSELLSEAKKLNDSQAPK

SEQ ID NO: 18 - protein, 58 aa, ARTIFICIAL SEQUENCE
  Engineered IL-6 binding polypeptide
VDAKYAKEEREAWYEIHLLPNLTVEQMAAFISKLFDDPSQSSELLSEAKKLNDSQAPK

SEQ ID NO: 19 - protein, 58 aa, ARTIFICIAL SEQUENCE
  Engineered IL-6 binding polypeptide
VDAKYAKEERDAWYEIHLLPNLTIDQMAAFISKLFDDPSQSSELLSEAKKLNDSQAPK

SEQ ID NO: 20 - protein, 58 aa, ARTIFICIAL SEQUENCE
  Engineered IL-6 binding polypeptide
VDAKYAKEERKAWFEIHALPNLTVDQMAAFISKLFDDPSQSSELLSEAKKLNDSQAPK

SEQ ID NO: 21 - protein, 58 aa, ARTIFICIAL SEQUENCE
  Engineered IL-6 binding polypeptide
VDAKYAKEEAKAWFEIHALPNLTVEQMAAFISKLFDDPSQSSELLSEAKKLNDSQAPK

SEQ ID NO: 22 - protein, 58 aa, ARTIFICIAL SEQUENCE
  Engineered IL-6 binding polypeptide
VDAKYAKEERTAWYEIHILPNLTVSQMAAFISKLFDDPSQSSELLSEAKKLNDSQAPK

SEQ ID NO: 23 - protein, 58 aa, ARTIFICIAL SEQUENCE
  Engineered IL-6 binding polypeptide
VDAKYAKEEQQAWTEIHSLPNLTVDQMAAFISKLFDDPSQSSELLSEAKKLNDSQAPK

SEQ ID NO: 24 - protein, 58 aa, ARTIFICIAL SEQUENCE
  Engineered IL-6 binding polypeptide
VDAKYAKEERDAWYEIHLLPNLTVEQIAAFISKLFDDPSQSSELLSEAKKLNDSQAPK

SEQ ID NO: 25 - protein, 58 aa, ARTIFICIAL SEQUENCE
  Engineered IL-6 binding polypeptide
VDAKYAKEERVAWYEIHLLPNLTITQMAAFISKLFDDPSQSSELLSEAKKLNDSQAPK

SEQ ID NO: 26 - protein, 58 aa, ARTIFICIAL SEQUENCE
  Engineered IL-6 binding polypeptide
VDAKYAKEERQAWYEIHLLPNLTVQQMAAFISKLFDDPSQSSELLSEAKKLNDSQAPK

SEQ ID NO: 27 - protein, 58 aa, ARTIFICIAL SEQUENCE
  Engineered IL-6 binding polypeptide
VDAKYAKEEASAWFEIHTLPNLTVQQMAAFISKLFDDPSQSSELLSEAKKLNDSQAPK

SEQ ID NO: 28 - protein, 58 aa, ARTIFICIAL SEQUENCE
  Engineered IL-6 binding polypeptide
VDAKYAKEEREAWYEIHVLPNLTVDQMAAFISKLFDDPSQSSELLSEAKKLNDSQAPK

SEQ ID NO: 29 - protein, 58 aa, ARTIFICIAL SEQUENCE
  Engineered IL-6 binding polypeptide
VDAKYAKEERKAWYEIHLLPNLTVNQMAAFISKLFDDPSQSSELLSEAKKLNDSQAPK

SEQ ID NO: 30 - protein, 58 aa, ARTIFICIAL SEQUENCE
  Engineered IL-6 binding polypeptide
VDAKYAKEERKAWYEIHLLPNLTVDQMAAFISKLFDDPSQSSELLSEAKKLNDSQAPK

SEQ ID NO: 31 - protein, 58 aa, ARTIFICIAL SEQUENCE
  Engineered IL-6 binding polypeptide
VDAKYAKEEARAWHEIHILPNLTVSQIAAFISKLFDDPSQSSELLSEAKKLNDSQAPK

SEQ ID NO: 32 - protein, 58 aa, ARTIFICIAL SEQUENCE
  Engineered IL-6 binding polypeptide
VDAKYAKEERAAWYEIHLLPNLTVDQMAAFISKLFDDPSQSSELLSEAKKLNDSQAPK

SEQ ID NO: 33 - protein, 58 aa, ARTIFICIAL SEQUENCE
  Engineered IL-6 binding polypeptide
VDAKYAKEERQAWYEIHTLPNLTAEQMAAFISKLFDDPSQSSELLSEAKKLNDSQAPK

SEQ ID NO: 34 - protein, 58 aa, ARTIFICIAL SEQUENCE
  Engineered IL-6 binding polypeptide
VDAKYAKEERQAWFEIHALPNLTVDQMAAFISKLFDDPSQSSELLSEAKKLNDSQAPK

SEQ ID NO: 35 - protein, 58 aa, ARTIFICIAL SEQUENCE
  Engineered IL-6 binding polypeptide
VDAKYAKEEARAWREIHLLPNLTVQQMAAFISKLFDDPSQSSELLSEAKKLNDSQAPK

SEQ ID NO: 36 - protein, 58 aa, ARTIFICIAL SEQUENCE
  Engineered IL-6 binding polypeptide
VDAKYAKEEAKAWREIHLLPNLTVTQMAAFISKLFDDPSQSSELLSEAKKLNDSQAPK

SEQ ID NO: 37 - protein, 58 aa, ARTIFICIAL SEQUENCE
  Engineered IL-6 binding polypeptide
VDAKYAKEEAEAWREIHLLPNLTVNQMAAFISKLFDDPSQSSELLSEAKKLNDSQAPK

SEQ ID NO: 38 - protein, 58 aa, ARTIFICIAL SEQUENCE
  Engineered IL-6 binding polypeptide
VDAKYAKEERDAWYEIHLLPNLTVQQMAAFISKLFDDPSQSSELLSEAKKLNDSQAPK

SEQ ID NO: 39 - protein, 58 aa, ARTIFICIAL SEQUENCE
  Engineered IL-6 binding polypeptide
VDAKYAKEEREAWYEIHLLPNLTVRQMAAFISKLFDDPSQSSELLSEAKKLNDSQAPK

SEQ ID NO: 40 - protein, 58 aa, ARTIFICIAL SEQUENCE
  Engineered IL-6 binding polypeptide
VDAKYAKEEREAWWEIHKLPNLTVNQMAAFISKLFDDPSQSSELLSEAKKLNDSQAPK

SEQ ID NO: 41 - protein, 58 aa, ARTIFICIAL SEQUENCE
  Engineered IL-6 binding polypeptide
VDAKYAKEERRAWYEIHLLPNLTIQQMAAFISKLFDDPSQSSELLSEAKKLNDSQAPK

SEQ ID NO: 42 - protein, 58 aa, ARTIFICIAL SEQUENCE
  Engineered IL-6 binding polypeptide
VDAKYAKEEAEAWREIHLLPNLTVHQMAAFISKLFDDPSQSSELLSEAKKLNDSQAPK

SEQ ID NO: 43 - protein, 58 aa, ARTIFICIAL SEQUENCE
  Engineered IL-6 binding polypeptide
VDAKYAKEERDAWHEIHLLPNLTVSQMAAFISKLFDDPSQSSELLSEAKKLNDSQAPK

SEQ ID NO: 44 - protein, 58 aa, ARTIFICIAL SEQUENCE
  Engineered IL-6 binding polypeptide
VDAKYAKEERRAWYEIHTLPNLTVQQMAAFISKLFDDPSQSSELLSEAKKLNDSQAPK

SEQ ID NO: 45 - protein, 58 aa, ARTIFICIAL SEQUENCE
  Engineered IL-6 binding polypeptide
VDAKYAKEERKAWFEIHKLPNLTVEQMAAFISKLFDDPSQSSELLSEAKKLNDSQAPK

SEQ ID NO: 46 - protein, 58 aa, ARTIFICIAL SEQUENCE
  Engineered IL-6 binding polypeptide
VDAKYAKEEHHAWTEIHLLPNLTVSQMAAFIQKLFDDPSQSSELLSEAKKLNDSQAPK

SEQ ID NO: 47 - protein, 58 aa, ARTIFICIAL SEQUENCE
  Engineered IL-6 binding polypeptide
VDAKYAKEEARAWFEIHALPNLTVQQVAAFISKLFDDPSQSSELLSEAKKLNDSQAPK

SEQ ID NO: 48 - protein, 58 aa, ARTIFICIAL SEQUENCE
  Engineered IL-6 binding polypeptide
VDAKYAKEEAKAWREIHILPNLTVQQMAAFISKLFDDPSQSSELLSEAKKLNDSQAPK

SEQ ID NO: 49 - protein, 58 aa, ARTIFICIAL SEQUENCE
  Engineered IL-6 binding polypeptide
VDAKYAKEEATAWHEIHTLPNLTVHQMAAFISKLFDDPSQSSELLSEAKKLNDSQAPK

SEQ ID NO: 50 - protein, 58 aa, ARTIFICIAL SEQUENCE
  Engineered IL-6 binding polypeptide
VDAKYAKEERSAWYEIHLLPNLTVTQMAAFISKLFDDPSQSSELLSEAKKLNDSQAPK

SEQ ID NO: 51 - protein, 58 aa, ARTIFICIAL SEQUENCE
  Engineered IL-6 binding polypeptide
VDAKYAKEERAAWFEIHTLPNLTVQQMAAFISKLFDDPSQSSELLSEAKKLNDSQAPK

SEQ ID NO: 52 - protein, 58 aa, ARTIFICIAL SEQUENCE
  Engineered IL-6 binding polypeptide
VDAKYAKEERTAWYEIHLLPNLTVTQMAAFISKLFDDPSQSSELLSEAKKLNDSQAPK

SEQ ID NO: 53 - protein, 58 aa, ARTIFICIAL SEQUENCE
  Engineered IL-6 binding polypeptide
VDAKYAKEERKAWFEIHALPNLTVSQMAAFISKLFDDPSQSSELLSEAKKLNDSQAPK

SEQ ID NO: 54 - protein, 58 aa, ARTIFICIAL SEQUENCE
  Engineered IL-6 binding polypeptide
VDAKYAKEEHRAWFEIHLLPNLTVEQMAAFISKLFDDPSQSSELLSEAKKLNDSQAPK

SEQ ID NO: 55 - protein, 58 aa, ARTIFICIAL SEQUENCE
  Engineered IL-6 binding polypeptide
VDAKYAKEERAAWYEIHILPNLTVQQMAAFIQKLFDDPSQSSELLSEAKKLNDSQAPK

SEQ ID NO: 56 - protein, 58 aa, ARTIFICIAL SEQUENCE
  Engineered IL-6 binding polypeptide
VDAKYAKEERQAWYEIHLLPNLTVSQIAAFISKLFDDPSQSSELLSEAKKLNDSQAPK

SEQ ID NO: 57 - protein, 58 aa, ARTIFICIAL SEQUENCE
  Engineered IL-6 binding polypeptide
VDAKYAKEEAAAWREIHLLPNLTVQQMAAFISKLFDDPSQSSELLSEAKKLNDSQAPK

SEQ ID NO: 58 - protein, 58 aa, ARTIFICIAL SEQUENCE
  Engineered IL-6 binding polypeptide
VDAKYAKEEREAWHEIHILPNLTIHQMAAFISKLFDDPSQSSELLSEAKKLNDSQAPK

SEQ ID NO: 59 - protein, 58 aa, ARTIFICIAL SEQUENCE
  Engineered IL-6 binding polypeptide
VDAKYAKEEAQAWLEIHLLPNLTVDQIAAFISKLFDDPSQSSELLSEAKKLNDSQAPK

SEQ ID NO: 60 - protein, 58 aa, ARTIFICIAL SEQUENCE
  Engineered IL-6 binding polypeptide
VDAKYAKEERKAWFEIHALPNLTVTQMAAFISKLFDDPSQSSELLSEAKKLNDSQAPK

SEQ ID NO: 61 - protein, 58 aa, ARTIFICIAL SEQUENCE
  Engineered IL-6 binding polypeptide
VDAKYAKEERDAWYEIHLLPNLTVEQMAAFISKLFDDPSQSSELLSEAKKLNDSQAPK

SEQ ID NO: 62 - protein, 58 aa, ARTIFICIAL SEQUENCE
  Engineered IL-6 binding polypeptide
VDAKYAKEEAAAWYEIHLLPNLTISQIAAFISKLFDDPSQSSELLSEAKKLNDSQAPK

SEQ ID NO: 63 - protein, 58 aa, ARTIFICIAL SEQUENCE
  Engineered IL-6 binding polypeptide
VDAKYAKEERVAWYEIHLLPNLTVRQMAAFISKLFDDPSQSSELLSEAKKLNDSQAPK

SEQ ID NO: 64 - protein, 58 aa, ARTIFICIAL SEQUENCE
  Engineered IL-6 binding polypeptide
VDAKYAKEEHHAWYEIHILPNLTVSQIAAFISKLFDDPSQSSELLSEAKKLNDSQAPK

SEQ ID NO: 65 - protein, 58 aa, ARTIFICIAL SEQUENCE
  Engineered IL-6 binding polypeptide
VDAKYAKEERAAWFEIHALPNLTVEQVAAFIIKLFDDPSQSSELLSEAKKLNDSQAPK

SEQ ID NO: 66 - protein, 58 aa, ARTIFICIAL SEQUENCE
  Engineered IL-6 binding polypeptide
VDAKYAKEEQEAWYEIHVLPNLTVTQMAAFISKLFDDPSQSSELLSEAKKLNDSQAPK

SEQ ID NO: 67 - protein, 58 aa, ARTIFICIAL SEQUENCE
  Engineered IL-6 binding polypeptide
VDAKYAKEEQQAWTEIHTLPNLTVDQMAAFISKLFDDPSQSSELLSEAKKLNDSQAPK

SEQ ID NO: 68 - protein, 58 aa, ARTIFICIAL SEQUENCE
  Engineered IL-6 binding polypeptide
VDAKYAKEERDAWYEIHLLPNLTVTQMAAFISKLFDDPSQSSELLSEAKKLNDSQAPK

SEQ ID NO: 69 - protein, 58 aa, ARTIFICIAL SEQUENCE
  Engineered IL-6 binding polypeptide
VDAKYAKEERDAWYEIHLLPNLTISQMAAFISKLFDDPSQSSELLSEAKKLNDSQAPK

SEQ ID NO: 70 - protein, 58 aa, ARTIFICIAL SEQUENCE
  Engineered IL-6 binding polypeptide
VDAKYAKEEREAWHEIHILPNLTVEQIAAFISKLFDDPSQSSELLSEAKKLNDSQAPK

SEQ ID NO: 71 - protein, 58 aa, ARTIFICIAL SEQUENCE
  Engineered IL-6 binding polypeptide
VDAKYAKEERDAWWEIHALPNLTVDQMAAFISKLFDDPSQSSELLSEAKKLNDSQAPK

SEQ ID NO: 72 - protein, 58 aa, ARTIFICIAL SEQUENCE
  Engineered IL-6 binding polypeptide
VDAKYAKEEARAWHEIHVLPNLTVSQMAAFIQKLFDDPSQSSELLSEAKKLNDSQAPK

SEQ ID NO: 73 - protein, 58 aa, ARTIFICIAL SEQUENCE
  Engineered IL-6 binding polypeptide
VDAKYAKEEAQAWYEIHTLPNLTVEQMAAFIAKLFDDPSQSSELLSEAKKLNDSQAPK

SEQ ID NO: 74 - protein, 58 aa, ARTIFICIAL SEQUENCE
  Engineered IL-6 binding polypeptide
VDAKYAKEERSAWWEIHTLPNLTVTQMAAFISKLFDDPSQSSELLSEAKKLNDSQAPK

SEQ ID NO: 75 - protein, 58 aa, ARTIFICIAL SEQUENCE
  Engineered IL-6 binding polypeptide
VDAKYAKEEADAWWEIHALPNLTIDQMAAFISKLFDDPSQSSELLSEAKKLNDSQAPK

SEQ ID NO: 76 - protein, 58 aa, ARTIFICIAL SEQUENCE
  Engineered IL-6 binding polypeptide
VDAKYAKEEAEAWYEIHLLPNLTVDQMAAFIIKLFDDPSQSSELLSEAKKLNDSQAPK

SEQ ID NO: 77 - protein, 58 aa, ARTIFICIAL SEQUENCE
  Engineered IL-6 binding polypeptide
VDAKYAKEERAAWYEIHSLPNLTVDQMAAFISKLFDDPSQSSELLSEAKKLNDSQAPK

SEQ ID NO: 78 - protein, 58 aa, ARTIFICIAL SEQUENCE
  Engineered IL-6 binding polypeptide
VDAKYAKEEQQAWLEIHLLPNLTIEQMAAFISKLFDDPSQSSELLSEAKKLNDSQAPK

SEQ ID NO: 79 - protein, 58 aa, ARTIFICIAL SEQUENCE
  Engineered IL-6 binding polypeptide
VDAKYAKEERDAWYEIHLLPNLTVHQIAAFISKLFDDPSQSSELLSEAKKLNDSQAPK

SEQ ID NO: 80 - protein, 58 aa, ARTIFICIAL SEQUENCE
  Engineered IL-6 binding polypeptide
VDAKYAKEERDAWYEIHTLPNLTVEQMAAFIWKLFDDPSQSSELLSEAKKLNDSQAPK

SEQ ID NO: 81 - protein, 58 aa, ARTIFICIAL SEQUENCE
  Engineered IL-6 binding polypeptide
VDAKYAKEEQHAWLEIHKLPNLTVEQIAAFISKLFDDPSQSSELLSEAKKLNDSQAPK

SEQ ID NO: 82 - protein, 58 aa, ARTIFICIAL SEQUENCE
  Engineered IL-6 binding polypeptide
VDAKYAKEEAAAWFEIHTLPNLTVDQMAAFISKLFDDPSQSSELLSEAKKLNDSQAPK

SEQ ID NO: 83 - protein, 58 aa, ARTIFICIAL SEQUENCE
  Engineered IL-6 binding polypeptide
VDAKYAKEERDAWFEIHTLPNLTVTQMAAFIIKLFDDPSQSSELLSEAKKLNDSQAPK

SEQ ID NO: 84 - protein, 58 aa, ARTIFICIAL SEQUENCE
  Engineered IL-6 binding polypeptide
VDAKYAKEERHAWHEIHILPNLTANQIAAFISKLFDDPSQSSELLSEAKKLNDSQAPK

SEQ ID NO: 85 - protein, 58 aa, ARTIFICIAL SEQUENCE
  Engineered IL-6 binding polypeptide
VDAKYAKEEREAWFEIHLLPNLTISQMAAFISKLFDDPSQSSELLSEAKKLNDSQAPK

SEQ ID NO: 86 - protein, 58 aa, ARTIFICIAL SEQUENCE
  Engineered IL-6 binding polypeptide
VDAKYAKEEAEAWWEIHLLPNLTVQQIAAFISKLFDDPSQSSELLSEAKKLNDSQAPK

SEQ ID NO: 87 - protein, 58 aa, ARTIFICIAL SEQUENCE
  Engineered IL-6 binding polypeptide
VDAKYAKEEAHAWYEIHILPNLTVSQMAAFISKLFDDPSQSSELLSEAKKLNDSQAPK

SEQ ID NO: 88 - protein, 58 aa, ARTIFICIAL SEQUENCE
  Engineered IL-6 binding polypeptide
VDAKYAKEERDAWYEIHLLPNLTIDQIAAFISKLFDDPSQSSELLSEAKKLNDSQAPK

SEQ ID NO: 89 - protein, 58 aa, ARTIFICIAL SEQUENCE
  Engineered IL-6 binding polypeptide
VDAKYAKEEQRAWREIHLLPNLTIEQMSAFISKLFDDPSQSSELLSEAKKLNDSQAPK

SEQ ID NO: 90 - protein, 58 aa, ARTIFICIAL SEQUENCE
  Engineered IL-6 binding polypeptide
VDAKYAKEEYDAWMEIHLLPNLTVDQMAAFITKLFDDPSQSSELLSEAKKLNDSQAPK

SEQ ID NO: 91 - protein, 58 aa, ARTIFICIAL SEQUENCE
  Engineered IL-6 binding polypeptide
VDAKYAKEEKHAWREIHLLPNLTVEQMAAFITKLFDDPSQSSELLSEAKKLNDSQAPK

SEQ ID NO: 92 - protein, 58 aa, ARTIFICIAL SEQUENCE
  Engineered IL-6 binding polypeptide
VDAKYAKEEKKAWTEIHLLPNLTIEQMAAFITKLFDDPSQSSELLSEAKKLNDSQAPK

SEQ ID NO: 93 - protein, 58 aa, ARTIFICIAL SEQUENCE
  Engineered IL-6 binding polypeptide
VDAKYAKEERFAWTEIHLLPNLTVDQMAAFITKLFDDPSQSSELLSEAKKLNDSQAPK

SEQ ID NO: 94 - protein, 58 aa, ARTIFICIAL SEQUENCE
  Engineered IL-6 binding polypeptide
VDAKYAKEERHAWTEIHLLPNLTIDQMAAFITKLFDDPSQSSELLSEAKKLNDSQAPK

SEQ ID NO: 95 - protein, 58 aa, ARTIFICIAL SEQUENCE
  Engineered IL-6 binding polypeptide
VDAKYAKEERAAWFEIHALPNLTVEQVAAFITKLFDDPSQSSELLSEAKKLNDSQAPK

SEQ ID NO: 96 - protein, 58 aa, ARTIFICIAL SEQUENCE
  Engineered IL-6 binding polypeptide
VDAKYAKEEKQAWYEIHNLPNLTVDQMAAFISKLFDDPSQSSELLSEAKKLNDSQAPK

SEQ ID NO: 97 - protein, 58 aa, ARTIFICIAL SEQUENCE
  Engineered IL-6 binding polypeptide
VDAKYAKEEAQAWWEIHALPNLTVDQVAAFITKLFDDPSQSSELLSEAKKLNDSQAPK

SEQ ID NO: 98 - protein, 58 aa, ARTIFICIAL SEQUENCE
  Engineered IL-6 binding polypeptide
VDAKYAKEEYEAWYEIHILPNLTVDQIAAFITKLFDDPSQSSELLSEAKKLNDSQAPK

SEQ ID NO: 99 - protein, 58 aa, ARTIFICIAL SEQUENCE
  Engineered IL-6 binding polypeptide
VDAKYAKEEYEAWHEIHILPNLTVDQMAAFITKLFDDPSQSSELLSEAKKLNDSQAPK

SEQ ID NO: 100 - protein, 58 aa, ARTIFICIAL SEQUENCE
  Engineered IL-6 binding polypeptide
VDAKYAKEERMAWMEIHLLPNLTVEQMAAFISKLFDDPSQSSELLSEAKKLNDSQAPK

SEQ ID NO: 101 - protein, 58 aa, ARTIFICIAL SEQUENCE
  Engineered IL-6 binding polypeptide
VDAKYAKEEYDAWVEIHALPNLTVEQVAAFITKLFDDPSQSSELLSEAKKLNDSQAPK

SEQ ID NO: 102 - protein, 58 aa, ARTIFICIAL SEQUENCE
  Engineered IL-6 binding polypeptide
VDAKYAKEEYEAWVEIHKLPNLTIDQMAAFITKLFDDPSQSSELLSEAKKLNDSQAPK

SEQ ID NO: 103 - protein, 58 aa, ARTIFICIAL SEQUENCE
  Engineered IL-6 binding polypeptide
VDAKYAKEEYHAWYEIHLLPNLTIDQMAAFITKLFDDPSQSSELLSEAKKLNDSQAPK

SEQ ID NO: 104 - protein, 58 aa, ARTIFICIAL SEQUENCE
  Engineered IL-6 binding polypeptide
VDAKYAKEEKDAWYEIHLLPNLTVEQIAAFITKLFDDPSQSSELLSEAKKLNDSQAPK

SEQ ID NO: 105 - protein, 58 aa, ARTIFICIAL SEQUENCE
  Engineered IL-6 binding polypeptide
VDAKYAKEEKHAWHEIHILPNLTVEQMAAFITKLFDDPSQSSELLSEAKKLNDSQAPK

SEQ ID NO: 106 - protein, 58 aa, ARTIFICIAL SEQUENCE
  Engineered IL-6 binding polypeptide
VDAKYAKEEKAAWFEIHALPNLTVEQVAAFITKLFDDPSQSSELLSEAKKLNDSQAPK

SEQ ID NO: 107 - protein, 58 aa, ARTIFICIAL SEQUENCE
  Engineered IL-6 binding polypeptide
VDAKYAKEEYHAWMEIHLLPNLTVSQMAAFITKLFDDPSQSSELLSEAKKLNDSQAPK

SEQ ID NO: 108 - protein, 58 aa, ARTIFICIAL SEQUENCE
  Engineered IL-6 binding polypeptide
VDAKYAKEEAFAWKEIHLLPNLTIDQMAAFITKLFDDPSQSSELLSEAKKLNDSQAPK

SEQ ID NO: 109 - protein, 58 aa, ARTIFICIAL SEQUENCE
  Engineered IL-6 binding polypeptide
VDAKYAKEEYEAWYEIHLLPNLTVSQIAAFITKLFDDPSQSSELLSEAKKLNDSQAPK

SEQ ID NO: 110 - protein, 58 aa, ARTIFICIAL SEQUENCE
  Engineered IL-6 binding polypeptide
VDAKYAKEEYYAWWEIHKLPNLTVDQMAAFITKLFDDPSQSSELLSEAKKLNDSQAPK

SEQ ID NO: 111 - protein, 58 aa, ARTIFICIAL SEQUENCE
  Engineered IL-6 binding polypeptide
VDAKYAKEEAVAWKEIHILPNLTVSQMAAFITKLFDDPSQSSELLSEAKKLNDSQAPK

SEQ ID NO: 112 - protein, 58 aa, ARTIFICIAL SEQUENCE
  Engineered IL-6 binding polypeptide
VDAKYAKEEKAAWYEIHLLPNLTIEQMAAFISKLFDDPSQSSELLSEAKKLNDSQAPK

SEQ ID NO: 113 - protein, 58 aa, ARTIFICIAL SEQUENCE
  Engineered IL-6 binding polypeptide
VDAKYAKEERAAWTEIHLLPNLTVEQMAAFITKLFDDPSQSSELLSEAKKLNDSQAPK

SEQ ID NO: 114 - protein, 58 aa, ARTIFICIAL SEQUENCE
  Engineered IL-6 binding polypeptide
VDAKYAKEERMAWYEIHTLPNLTVEQMAAFITKLFDDPSQSSELLSEAKKLNDSQAPK

SEQ ID NO: 115 - protein, 58 aa, ARTIFICIAL SEQUENCE
  Engineered IL-6 binding polypeptide
VDAKYAKEEHHAWREIHLLPNLTVDQMAAFITKLFDDPSQSSELLSEAKKLNDSQAPK

SEQ ID NO: 116 - protein, 58 aa, ARTIFICIAL SEQUENCE
  Engineered IL-6 binding polypeptide
VDAKYAKEEAKAWMEIHLLPNLTIDQMAAFITKLFDDPSQSSELLSEAKKLNDSQAPK

SEQ ID NO: 117 - protein, 58 aa, ARTIFICIAL SEQUENCE
  Engineered IL-6 binding polypeptide
VDAKYAKEEKAAWYEIHLLPNLTVDQIAAFITKLFDDPSQSSELLSEAKKLNDSQAPK

SEQ ID NO: 118 - protein, 58 aa, ARTIFICIAL SEQUENCE
  Engineered IL-6 binding polypeptide
VDAKYAKEEKHAWMEIHKLPNLTVDQMAAFITKLFDDPSQSSELLSEAKKLNDSQAPK

SEQ ID NO: 119 - protein, 58 aa, ARTIFICIAL SEQUENCE
  Engineered IL-6 binding polypeptide
VDAKYAKEEKAAWNEIHKLPNLTVDQMAAFITKLFDDPSQSSELLSEAKKLNDSQAPK

SEQ ID NO: 120 - protein, 58 aa, ARTIFICIAL SEQUENCE
  Engineered IL-6 binding polypeptide
VDAKYAKEERKAWVEIHNLPNLTVDQMAAFITKLFDDPSQSSELLSEAKKLNDSQAPK

SEQ ID NO: 121 - protein, 58 aa, ARTIFICIAL SEQUENCE
  Engineered IL-6 binding polypeptide
VDAKYAKEEAIAWHEIHVLPNLTVDQIAAFITKLFDDPSQSSELLSEAKKLNDSQAPK

SEQ ID NO: 122 - protein, 58 aa, ARTIFICIAL SEQUENCE
  Engineered IL-6 binding polypeptide
VDAKYAKEEYEAWYEIHLLPNLTIQQMAAFISKLFDDPSQSSELLSEAKKLNDSQAPK

SEQ ID NO: 123 - protein, 58 aa, ARTIFICIAL SEQUENCE
  Engineered IL-6 binding polypeptide
VDAKYAKEEYHAWVEIHNLPNLTIDQMAAFITKLFDDPSQSSELLSEAKKLNDSQAPK

SEQ ID NO: 124 - protein, 58 aa, ARTIFICIAL SEQUENCE
  Engineered IL-6 binding polypeptide
VDAKYAKEEAFAWREIHLLPNLTIDQMAAFITKLFDDPSQSSELLSEAKKLNDSQAPK

SEQ ID NO: 125 - protein, 58 aa, ARTIFICIAL SEQUENCE
  Engineered IL-6 binding polypeptide
VDAKYAKEEKEAWYEIHLLPNLTVSQMAAFITKLFDDPSQSSELLSEAKKLNDSQAPK

SEQ ID NO: 126 - protein, 58 aa, ARTIFICIAL SEQUENCE
  Engineered IL-6 binding polypeptide
VDAKYAKEERKAWYEIHLLPNLTIDQMAAFITKLFDDPSQSSELLSEAKKLNDSQAPK

SEQ ID NO: 127 - protein, 58 aa, ARTIFICIAL SEQUENCE
  Engineered IL-6 binding polypeptide
VDAKYAKEEYDAWYEIHTLPNLTVDQMAAFISKLFDDPSQSSELLSEAKKLNDSQAPK

SEQ ID NO: 128 - protein, 58 aa, ARTIFICIAL SEQUENCE
  Engineered IL-6 binding polypeptide
VDAKYAKEERNAWTEIHLLPNLTIEQMAAFITKLFDDPSQSSELLSEAKKLNDSQAPK

SEQ ID NO: 129 - protein, 58 aa, ARTIFICIAL SEQUENCE
  Engineered IL-6 binding polypeptide
VDAKYAKEEYKAWLEIHNLPNLTVDQMAAFITKLFDDPSQSSELLSEAKKLNDSQAPK

SEQ ID NO: 130 - protein, 58 aa, ARTIFICIAL SEQUENCE
  Engineered IL-6 binding polypeptide
VDAKYAKEEYEAWMEIHLLPNLTVEQIAAFITKLFDDPSQSSELLSEAKKLNDSQAPK

SEQ ID NO: 131 - protein, 58 aa, ARTIFICIAL SEQUENCE
  Engineered IL-6 binding polypeptide
VDAKYAKEERDAWFEIHKLPNLTVDQMAAFITKLFDDPSQSSELLSEAKKLNDSQAPK

SEQ ID NO: 132 - protein, 58 aa, ARTIFICIAL SEQUENCE
  Engineered IL-6 binding polypeptide
VDAKYAKEEAYAWKEIHLLPNLTVDQMAAFITKLFDDPSQSSELLSEAKKLNDSQAPK

SEQ ID NO: 133 - protein, 58 aa, ARTIFICIAL SEQUENCE
  Engineered IL-6 binding polypeptide
VDAKYAKEEYFAWWEIHKLPNLTVNQMAAFITKLFDDPSQSSELLSEAKKLNDSQAPK

SEQ ID NO: 134 - protein, 58 aa, ARTIFICIAL SEQUENCE
  Engineered IL-6 binding polypeptide
VDAKYAKEEKQAWVEIHNLPNLTITQMAAFITKLFDDPSQSSELLSEAKKLNDSQAPK

SEQ ID NO: 135 - protein, 58 aa, ARTIFICIAL SEQUENCE
  Engineered IL-6 binding polypeptide
VDAKYAKEEQRAWYEIHILPNLTIDQMAAFITKLFDDPSQSSELLSEAKKLNDSQAPK

SEQ ID NO: 136 - protein, 58 aa, ARTIFICIAL SEQUENCE
  Engineered IL-6 binding polypeptide
VDAKYAKEEARAWREIHALPNLTIDQMAAFITKLFDDPSQSSELLSEAKKLNDSQAPK

SEQ ID NO: 137 - protein, 58 aa, ARTIFICIAL SEQUENCE
  Engineered IL-6 binding polypeptide
VDAKYAKEERYAWNEIHKLPNLTVDQMAAFITKLFDDPSQSSELLSEAKKLNDSQAPK

SEQ ID NO: 138 - protein, 58 aa, ARTIFICIAL SEQUENCE
  Engineered IL-6 binding polypeptide
VDAKYAKEEAKAWYEIHILPNLTVDQIAAFITKLFDDPSQSSELLSEAKKLNDSQAPK

SEQ ID NO: 139 - protein, 58 aa, ARTIFICIAL SEQUENCE
  Engineered IL-6 binding polypeptide
VDAKYAKEEARAWHEIHILPNLTIDQMAAFITKLFDDPSQSSELLSEAKKLNDSQAPK

SEQ ID NO: 140 - protein, 58 aa, ARTIFICIAL SEQUENCE
  Engineered IL-6 binding polypeptide
VDAKYAKEEKKAWYEIHLLPNLTIEQMAAFITKLFDDPSQSSELLSEAKKLNDSQAPK

SEQ ID NO: 141 - protein, 58 aa, ARTIFICIAL SEQUENCE
  Engineered IL-6 binding polypeptide
VDAKYAKEEARAWTEIHLLPNLTVDQMAAFITKLFDDPSQSSELLSEAKKLNDSQAPK

SEQ ID NO: 142 - protein, 58 aa, ARTIFICIAL SEQUENCE
  Engineered IL-6 binding polypeptide
VDAKYAKEERSAWMEIHLLPNLTVDQMAAFITKLFDDPSQSSELLSEAKKLNDSQAPK

SEQ ID NO: 143 - protein, 58 aa, ARTIFICIAL SEQUENCE
  Engineered IL-6 binding polypeptide
VDAKYAKEEREAWFEIHILPNLTIDQMAAFITKLFDDPSQSSELLSEAKKLNDSQAPK

SEQ ID NO: 144 - protein, 58 aa, ARTIFICIAL SEQUENCE
  Engineered IL-6 binding polypeptide
VDAKYAKEEYEAWTEIHLLPNLTIEQMAAFITKLFDDPSQSSELLSEAKKLNDSQAPK

SEQ ID NO: 145 - protein, 58 aa, ARTIFICIAL SEQUENCE
  Engineered IL-6 binding polypeptide
VDAKYAKEEYEAWVEIHNLPNLTITQMAAFITKLFDDPSQSSELLSEAKKLNDSQAPK

SEQ ID NO: 146 - protein, 58 aa, ARTIFICIAL SEQUENCE
  Engineered IL-6 binding polypeptide
VDAKYAKEEYKAWHEIHILPNLTVDQMAAFITKLFDDPSQSSELLSEAKKLNDSQAPK

SEQ ID NO: 147 - protein, 58 aa, ARTIFICIAL SEQUENCE
  Engineered IL-6 binding polypeptide
VDAKYAKEEREAWMEIHLLPNLTIDQMAAFITKLFDDPSQSSELLSEAKKLNDSQAPK

SEQ ID NO: 148 - protein, 58 aa, ARTIFICIAL SEQUENCE
  Engineered IL-6 binding polypeptide
VDAKYAKEEYKAWVEIHLLPNLTVDQIAAFITKLFDDPSQSSELLSEAKKLNDSQAPK

SEQ ID NO: 149 - protein, 58 aa, ARTIFICIAL SEQUENCE
  Engineered IL-6 binding polypeptide
VDAKYAKEEKIAWYEIHLLPNLTVNQIAAFITKLFDDPSQSSELLSEAKKLNDSQAPK

SEQ ID NO: 150 - protein, 58 aa, ARTIFICIAL SEQUENCE
  Engineered IL-6 binding polypeptide
VDAKYAKEEAYAWKEIHLLPNLTIEQMAAFISKLFDDPSQSSELLSEAKKLNDSQAPK

SEQ ID NO: 151 - protein, 58 aa, ARTIFICIAL SEQUENCE
  Engineered IL-6 binding polypeptide
VDAKYAKEEQVAWWEISHLPNLTITQVVAFIQKLFDDPSQSSELLSEAKKLNDSQAPK

SEQ ID NO: 152 - protein, 58 aa, ARTIFICIAL SEQUENCE
  Engineered IL-6 binding polypeptide
VDAKYAKEEQVAWWEISHLPNLTIEQVVAFIQKLFDDPSQSSELLSEAKKLNDSQAPK

SEQ ID NO: 153 - protein, 58 aa, ARTIFICIAL SEQUENCE
  Engineered IL-6 binding polypeptide
VDAKYAKEEREAWYEIHTLPNLTAQQMAAFIVKLYDDPSQSSELLSEAKKLNDSQAPK

SEQ ID NO: 154 - protein, 58 aa, ARTIFICIAL SEQUENCE
  Engineered IL-6 binding polypeptide
VDAKYAKEEAQAWLEIHLLPNLTVDQMAAFISKLFDDPSQSSELLSEAKKLNDSQAPK

SEQ ID NO: 155 - protein, 58 aa, ARTIFICIAL SEQUENCE
  Engineered IL-6 binding polypeptide
VDAKYAKEERHAWFEIHSLPNLTVNQMSAFISKLFDDPSQSSELLSEAKKLNDSQAPK

SEQ ID NO: 156 - protein, 58 aa, ARTIFICIAL SEQUENCE
  Engineered IL-6 binding polypeptide
VDAKYAKEEADAWWEIHALPNLTVDQMAAFISKLFDDPSQSSELLSEAKKLNDSQAPK

SEQ ID NO: 157 - protein, 58 aa, ARTIFICIAL SEQUENCE
  Engineered IL-6 binding polypeptide
VDAKYAKEEARAWLEIHALPNLTVTQMAAFIIKLYDDPSQSSELLSEAKKLNDSQAPK

SEQ ID NO: 158 - protein, 58 aa, ARTIFICIAL SEQUENCE
  Engineered IL-6 binding polypeptide
VDAKYAKEERRAWTEIHLLPNLTVDQMAAFISKLFDDPSQSSELLSEAKKLNDSQAPK

SEQ ID NO: 159 - protein, 58 aa, ARTIFICIAL SEQUENCE
  Engineered IL-6 binding polypeptide
VDAKYAKEERHAWYEIHTLPNLTVTQMSAFIQKLFDDPSQSSELLSEAKKLNDSQAPK

SEQ ID NO: 160 - protein, 58 aa, ARTIFICIAL SEQUENCE
  Engineered IL-6 binding polypeptide
VDAKYAKEEAQAWFEIHLLPNLTIDQMAAFISKLFDDPSQSSELLSEAKKLNDSQAPK

SEQ ID NO: 161 - protein, 58 aa, ARTIFICIAL SEQUENCE
  Engineered IL-6 binding polypeptide
VDAKYAKEERAAWHEIHVLPNLTVSQMAAFIIKLFDDPSQSSELLSEAKKLNDSQAPK

SEQ ID NO: 162 - protein, 58 aa, ARTIFICIAL SEQUENCE
  Engineered IL-6 binding polypeptide
VDAKYAKEEREAWYEIHVLPNLTVHQRAAFISKLFDDPSQSSELLSEAKKLNDSQAPK

SEQ ID NO: 163 - protein, 58 aa, ARTIFICIAL SEQUENCE
  Engineered IL-6 binding polypeptide
VDAKYAKEERHAWYEIHLLPNLTVHQIAAFISKLFDDPSQSSELLSEAKKLNDSQAPK

SEQ ID NO: 164 - protein, 58 aa, ARTIFICIAL SEQUENCE
  Engineered IL-6 binding polypeptide
VDAKYAKEERHAWFEIHTLPNLTINQRTAFIQKLFDDPSQSSELLSEAKKLNDSQAPK

SEQ ID NO: 165 - protein, 58 aa, ARTIFICIAL SEQUENCE
  Engineered IL-6 binding polypeptide
VDAKYAKEERHAWYEIHVLPNLTVSQMAAFIMKLFDDPSQSSELLSEAKKLNDSQAPK

SEQ ID NO: 166 - protein, 58 aa, ARTIFICIAL SEQUENCE
  Engineered IL-6 binding polypeptide
VDAKYAKEERDAWLEIHMLPNLTITQVAAFISKLFDDPSQSSELLSEAKKLNDSQAPK

SEQ ID NO: 167 - protein, 58 aa, ARTIFICIAL SEQUENCE
  Engineered IL-6 binding polypeptide
VDAKYAKEEARAWHEIHVLPNLTAEQMAAFISKLFDDPSQSSELLSEAKKLNDSQAPK

SEQ ID NO: 168 - protein, 58 aa, ARTIFICIAL SEQUENCE
  Engineered IL-6 binding polypeptide
VDAKYAKEEAEAWLEIHLLPNLTVEQITAFISKLFDDPSQSSELLSEAKKLNDSQAPK

SEQ ID NO: 169 - protein, 58 aa, ARTIFICIAL SEQUENCE
  Engineered IL-6 binding polypeptide
VDAKYAKEERDAWHEIHLLPNLTVEQRAAFISKLFDDPSQSSELLSEAKKLNDSQAPK

SEQ ID NO: 170 - protein, 58 aa, ARTIFICIAL SEQUENCE
  Engineered IL-6 binding polypeptide
VDAKYAKEERKAWTEIHSLPNLTVTQMAAFISKLFDDPSQSSELLSEAKKLNDSQAPK

SEQ ID NO: 171 - protein, 58 aa, ARTIFICIAL SEQUENCE
  Engineered IL-6 binding polypeptide
VDAKYAKEERDAWHEIHILPNLTVEQMSAFISKLFDDPSQSSELLSEAKKLNDSQAPK

SEQ ID NO: 172 - protein, 58 aa, ARTIFICIAL SEQUENCE
  Engineered IL-6 binding polypeptide
VDAKYAKEEAEAWFEIHALPNLTAEQMAAFISKLFDDPSQSSELLSEAKKLNDSQAPK

SEQ ID NO: 173 - protein, 58 aa, ARTIFICIAL SEQUENCE
  Engineered IL-6 binding polypeptide
VDAKYAKEEHQAWWEIHLLPNLTVDQMSAFISKLFDDPSQSSELLSEAKKLNDSQAPK

SEQ ID NO: 174 - protein, 58 aa, ARTIFICIAL SEQUENCE
  Engineered IL-6 binding polypeptide
VDAKYAKEERDAWHEIHKLPNLTVNQVAAFISKLFDDPSQSSELLSEAKKLNDSQAPK

SEQ ID NO: 175 - protein, 58 aa, ARTIFICIAL SEQUENCE
  Engineered IL-6 binding polypeptide
VDAKYAKEEADAWFEIHLLPNLTVDQIAAFIQKLFDDPSQSSELLSEAKKLNDSQAPK

SEQ ID NO: 176 - protein, 58 aa, ARTIFICIAL SEQUENCE
  Engineered IL-6 binding polypeptide
VDAKYAKEERAAWYEIHVLPNLTVEQMAAFIQKLFDDPSQSSELLSEAKKLNDSQAPK

SEQ ID NO: 177 - protein, 58 aa, ARTIFICIAL SEQUENCE
  Engineered IL-6 binding polypeptide
VDAKYAKEEHRAWHEIHLLPNLTVNQIAAFISKLFDDPSQSSELLSEAKKLNDSQAPK

SEQ ID NO: 178 - protein, 58 aa, ARTIFICIAL SEQUENCE
  Engineered IL-6 binding polypeptide
VDAKYAKEEAVAWHEIHMLPNLTVEQMAAFISKLFDDPSQSSELLSEAKKLNDSQAPK

SEQ ID NO: 179 - protein, 58 aa, ARTIFICIAL SEQUENCE
  Engineered IL-6 binding polypeptide
VDAKYAKEEREAWWEIHALPNLTVSQMAAFISKLFDDPSQSSELLSEAKKLNDSQAPK

SEQ ID NO: 180 - protein, 58 aa, ARTIFICIAL SEQUENCE
  Engineered IL-6 binding polypeptide
VDAKYAKEERKAWFEIHSLPNLTVDQMSAFISKLFDDPSQSSELLSEAKKLNDSQAPK

SEQ ID NO: 181 - protein, 58 aa, ARTIFICIAL SEQUENCE
  Engineered IL-6 binding polypeptide
VDAKYAKEEQRAWWEIHTLPNLTTDQMAAFISKLFDDPSQSSELLSEAKKLNDSQAPK

SEQ ID NO: 182 - protein, 58 aa, ARTIFICIAL SEQUENCE
  Engineered IL-6 binding polypeptide
VDAKYAKEERQAWFEIHALPNLTVDQAAAFIIKLYDDPSQSSELLSEAKKLNDSQAPK

SEQ ID NO: 183 - protein, 58 aa, ARTIFICIAL SEQUENCE
  Engineered IL-6 binding polypeptide
VDAKYAKEEARAWTEIHALPNLTVDQMAAFIIKLYDDPSQSSELLSEAKKLNDSQAPK

SEQ ID NO: 184 - protein, 58 aa, ARTIFICIAL SEQUENCE
  Engineered IL-6 binding polypeptide
VDAKYAKEERRAWHEIHMLPNLTVTQMSAFISKLFDDPSQSSELLSEAKKLNDSQAPK

SEQ ID NO: 185 - protein, 58 aa, ARTIFICIAL SEQUENCE
  Engineered IL-6 binding polypeptide
VDAKYAKEEAKAWLEIHKLPNLTVNQMAAFISKLFDDPSQSSELLSEAKKLNDSQAPK

SEQ ID NO: 186 - protein, 58 aa, ARTIFICIAL SEQUENCE
  Engineered IL-6 binding polypeptide
VDAKYAKEEREAWHEIHLLPNLTISQIAAFISKLFDDPSQSSELLSEAKKLNDSQAPK

SEQ ID NO: 187 - protein, 58 aa, ARTIFICIAL SEQUENCE
  Engineered IL-6 binding polypeptide
VDAKYAKEEQHAWYEIHLLPNLTVTQMAAFISKLFDDPSQSSELLSEAKKLNDSQAPK

SEQ ID NO: 188 - protein, 58 aa, ARTIFICIAL SEQUENCE
  Engineered IL-6 binding polypeptide
VDAKYAKEEHKAWFEIHLLPNLTISQMAAFISKLFDDPSQSSELLSEAKKLNDSQAPK

SEQ ID NO: 189 - protein, 58 aa, ARTIFICIAL SEQUENCE
  Engineered IL-6 binding polypeptide
VDAKYAKEERRAWYEIHLLPNLTVTQMTAFISKLFDDPSQSSELLSEAKKLNDSQAPK

SEQ ID NO: 190 - protein, 58 aa, ARTIFICIAL SEQUENCE
  Engineered IL-6 binding polypeptide
VDAKYAKEERHAWTEIHILPNLTVRQMAAFISKLFDDPSQSSELLSEAKKLNDSQAPK

SEQ ID NO: 191 - protein, 58 aa, ARTIFICIAL SEQUENCE
  Engineered IL-6 binding polypeptide
VDAKYAKEERHAWHEIHLLPNLTIQQMAAFISKLFDDPSQSSELLSEAKKLNDSQAPK

SEQ ID NO: 192 - protein, 58 aa, ARTIFICIAL SEQUENCE
  Engineered IL-6 binding polypeptide
VDAKYAKEEQHAWTEIHKLPNLTIQQMAAFIQKLFDDPSQSSELLSEAKKLNDSQAPK

SEQ ID NO: 193 - protein, 58 aa, ARTIFICIAL SEQUENCE
  Engineered IL-6 binding polypeptide
VDAKYAKEEHRAWTEIHLLPNLTVSQMVAFISKLFDDPSQSSELLSEAKKLNDSQAPK

SEQ ID NO: 194 - protein, 58 aa, ARTIFICIAL SEQUENCE
  Engineered IL-6 binding polypeptide
VDAKYAKEEQDAWYEIHVLPNLTVEQLVAFISKLFDDPSQSSELLSEAKKLNDSQAPK

SEQ ID NO: 195 - protein, 58 aa, ARTIFICIAL SEQUENCE
  Engineered IL-6 binding polypeptide
VDAKYAKEEREAWHEIHSLPNLTVDQMTAFIIKLMDDPSQSSELLSEAKKLNDSQAPK

SEQ ID NO: 196 - protein, 58 aa, ARTIFICIAL SEQUENCE
  Engineered IL-6 binding polypeptide
VDAKYAKEEAAAWFEIHLLPNLTTEQMAAFIMKLFDDPSQSSELLSEAKKLNDSQAPK

SEQ ID NO: 197 - protein, 58 aa, ARTIFICIAL SEQUENCE
  Engineered IL-6 binding polypeptide
VDAKYAKEERAAWYEIHILPNLTVRQMAAFISKLFDDPSQSSELLSEAKKLNDSQAPK

SEQ ID NO: 198 - protein, 58 aa, ARTIFICIAL SEQUENCE
  Engineered IL-6 binding polypeptide
VDAKYAKEEARAWTEIHALPNLTVDQVTAFIIKLYDDPSQSSELLSEAKKLNDSQAPK

SEQ ID NO: 199 - protein, 58 aa, ARTIFICIAL SEQUENCE
  Engineered IL-6 binding polypeptide
VDAKYAKEEQRAWFEIHTLPNLTVDQIEAFISKLFDDPSQSSELLSEAKKLNDSQAPK

SEQ ID NO: 200 - protein, 58 aa, ARTIFICIAL SEQUENCE
  Engineered IL-6 binding polypeptide
VDAKYAKEEAAAWHEIHILPNLTVSQMAAFISKLFDDPSQSSELLSEAKKLNDSQAPK

SEQ ID NO: 201 - protein, 58 aa, ARTIFICIAL SEQUENCE
  Engineered IL-6 binding polypeptide
VDAKYAKEEAQAWWEIHSLPNLTVEQTSAFIQKLFDDPSQSSELLSEAKKLNDSQAPK

SEQ ID NO: 202 - protein, 58 aa, ARTIFICIAL SEQUENCE
  Engineered IL-6 binding polypeptide
VDAKYAKEEREAWHEIHALPNLTIDQRVAFISKLFDDPSQSSELLSEAKKLNDSQAPK

SEQ ID NO: 203 - protein, 58 aa, ARTIFICIAL SEQUENCE
  Engineered IL-6 binding polypeptide
VDAKYAKEEREAWYEIHLLPNLTINQMAAFISKLFDDPSQSSELLSEAKKLNDSQAPK

SEQ ID NO: 204 - protein, 58 aa, ARTIFICIAL SEQUENCE
  Engineered IL-6 binding polypeptide
VDAKYAKEERDAWYEIHLLPNLTIRQMAAFISKLFDDPSQSSELLSEAKKLNDSQAPK

SEQ ID NO: 205 - protein, 58 aa, ARTIFICIAL SEQUENCE
  Engineered IL-6 binding polypeptide
VDAKYAKEEQKAWTEIHLLPNLTVHQIAAFISKLFDDPSQSSELLSEAKKLNDSQAPK

SEQ ID NO: 206 - protein, 58 aa, ARTIFICIAL SEQUENCE
  Engineered IL-6 binding polypeptide
VDAKYAKEERAAWREIHLLPNLTTEQRTAFISKLFDDPSQSSELLSEAKKLNDSQAPK

SEQ ID NO: 207 - protein, 58 aa, ARTIFICIAL SEQUENCE
  Engineered IL-6 binding polypeptide
VDAKYAKEEQDAWREIHLLPNLTINQIVAFIQKLFDDPSQSSELLSEAKKLNDSQAPK

SEQ ID NO: 208 - protein, 58 aa, ARTIFICIAL SEQUENCE
  Engineered IL-6 binding polypeptide
VDAKYAKEEREAWYEIHSLPNLTVTQIAAFISKLFDDPSQSSELLSEAKKLNDSQAPK

SEQ ID NO: 209 - protein, 58 aa, ARTIFICIAL SEQUENCE
  Engineered IL-6 binding polypeptide
VDAKYAKEEATAWYEIHILPNLTVDQMAAFISKLFDDPSQSSELLSEAKKLNDSQAPK

SEQ ID NO: 210 - protein, 58 aa, ARTIFICIAL SEQUENCE
  Engineered IL-6 binding polypeptide
VDAKYAKEERDAWYEIHKLPNLTANQMAAFISKLFDDPSQSSELLSEAKKLNDSQAPK

SEQ ID NO: 211 - protein, 58 aa, ARTIFICIAL SEQUENCE
  Engineered IL-6 binding polypeptide
VDAKYAKEERDAWFEIHALPNLTVHQMTAFIIKLFDDPSQSSELLSEAKKLNDSQAPK

SEQ ID NO: 212 - protein, 58 aa, ARTIFICIAL SEQUENCE
  Engineered IL-6 binding polypeptide
VDAKYAKEEREAWSEIHKLPNLTVDQMAAFISKLFDDPSQSSELLSEAKKLNDSQAPK

SEQ ID NO: 213 - protein, 58 aa, ARTIFICIAL SEQUENCE
  Engineered IL-6 binding polypeptide
VDAKYAKEEREAWFEIHLLPNLTVDQMAAFISKLFDDPSQSSELLSEAKKLNDSQAPK

SEQ ID NO: 214 - protein, 58 aa, ARTIFICIAL SEQUENCE
  Engineered IL-6 binding polypeptide
VDAKYAKEERKAWYEIHLLPNLTVQQMAAFISKLFDDPSQSSELLSEAKKLNDSQAPK

SEQ ID NO: 215 - protein, 58 aa, ARTIFICIAL SEQUENCE
  Engineered IL-6 binding polypeptide
VDAKYAKEEREAWYEIHSLPNLTVNQVAAFIQKLFDDPSQSSELLSEAKKLNDSQAPK

SEQ ID NO: 216 - protein, 58 aa, ARTIFICIAL SEQUENCE
  Engineered IL-6 binding polypeptide
VDAKYAKEERHAWREIHLLPNLTTEQRVAFIIKLFDDPSQSSELLSEAKKLNDSQAPK

SEQ ID NO: 217 - protein, 58 aa, ARTIFICIAL SEQUENCE
  Engineered IL-6 binding polypeptide
VDAKYAKEEREAWTEIHSLPNLTVDQVTAFISKLFDDPSQSSELLSEAKKLNDSQAPK

SEQ ID NO: 218 - protein, 58 aa, ARTIFICIAL SEQUENCE
  Engineered IL-6 binding polypeptide
VDAKYAKEERDAWWEIHLLPNLTVNQISAFISKLFDDPSQSSELLSEAKKLNDSQAPK

SEQ ID NO: 219 - protein, 58 aa, ARTIFICIAL SEQUENCE
  Engineered IL-6 binding polypeptide
VDAKYAKEEHHAWREIHLLPNLTVEQMAAFISKLFDDPSQSSELLSEAKKLNDSQAPK

SEQ ID NO: 220 - protein, 58 aa, ARTIFICIAL SEQUENCE
  Engineered IL-6 binding polypeptide
VDAKYAKEEQQAWHEIHLLPNLTVDQMAAFISKLFDDPSQSSELLSEAKKLNDSQAPK

SEQ ID NO: 221 - protein, 58 aa, ARTIFICIAL SEQUENCE
  Engineered IL-6 binding polypeptide
VDAKYAKEEAQAWHEIHLLPNLTIHQMSAFISKLFDDPSQSSELLSEAKKLNDSQAPK

SEQ ID NO: 222 - protein, 58 aa, ARTIFICIAL SEQUENCE
  Engineered IL-6 binding polypeptide
VDAKYAKEEAKAWWEIHVLPNLTIDQIAAFISKLFDDPSQSSELLSEAKKLNDSQAPK

SEQ ID NO: 223 - protein, 58 aa, ARTIFICIAL SEQUENCE
  Engineered IL-6 binding polypeptide
VDAKYAKEEAQAWHEIHTLPNLTTEQMAAFISKLFDDPSQSSELLSEAKKLNDSQAPK

SEQ ID NO: 224 - protein, 58 aa, ARTIFICIAL SEQUENCE
  Engineered IL-6 binding polypeptide
VDAKYAKEERDAWSEIHSLPNLTISQMAAFISKLFDDPSQSSELLSEAKKLNDSQAPK

SEQ ID NO: 225 - protein, 58 aa, ARTIFICIAL SEQUENCE
  Engineered IL-6 binding polypeptide
VDAKYAKEERKAWHEIHILPNLTAEQLAAFISKLFDDPSQSSELLSEAKKLNDSQAPK

SEQ ID NO: 226 - protein, 58 aa, ARTIFICIAL SEQUENCE
  Engineered IL-6 binding polypeptide
VDAKYAKEEADAWREIHVLPNLTTQQITAFIQKLFDDPSQSSELLSEAKKLNDSQAPK

SEQ ID NO: 227 - protein, 58 aa, ARTIFICIAL SEQUENCE
  Engineered IL-6 binding polypeptide
VDAKYAKEERSAWTEIHMLPNLTVQQRAAFISKLFDDPSQSSELLSEAKKLNDSQAPK

SEQ ID NO: 228 - protein, 58 aa, ARTIFICIAL SEQUENCE
  Engineered IL-6 binding polypeptide
VDAKYAKEEREAWYEIHLLPNLTIDQMSAFISKLFDDPSQSSELLSEAKKLNDSQAPK

SEQ ID NO: 229 - protein, 58 aa, ARTIFICIAL SEQUENCE
  Engineered IL-6 binding polypeptide
VDAKYAKEEREAWYEIHLLPNLTVEQIVAFISKLFDDPSQSSELLSEAKKLNDSQAPK

SEQ ID NO: 230 - protein, 58 aa, ARTIFICIAL SEQUENCE
  Engineered IL-6 binding polypeptide
VDAKYAKEERKAWFEIHSLPNLTVNQMAAFIQKLFDDPSQSSELLSEAKKLNDSQAPK

SEQ ID NO: 231 - protein, 58 aa, ARTIFICIAL SEQUENCE
  Engineered IL-6 binding polypeptide
VDAKYAKEEADAWFEIHLLPNLTIDQVSAFISKLFDDPSQSSELLSEAKKLNDSQAPK

SEQ ID NO: 232 - protein, 58 aa, ARTIFICIAL SEQUENCE
  Engineered IL-6 binding polypeptide
VDAKYAKEERDAWFEIHLLPNLTIEQMAAFISKLFDDPSQSSELLSEAKKLNDSQAPK

SEQ ID NO: 233 - protein, 58 aa, ARTIFICIAL SEQUENCE
  Engineered IL-6 binding polypeptide
VDAKYAKEEADAWREIHTLPNLTVDQMSAFISKLFDDPSQSSELLSEAKKLNDSQAPK

SEQ ID NO: 234 - protein, 58 aa, ARTIFICIAL SEQUENCE
  Engineered IL-6 binding polypeptide
VDAKYAKEERVAWYEIHMLPNLTINQMAAFISKLFDDPSQSSELLSEAKKLNDSQAPK

SEQ ID NO: 235 - protein, 58 aa, ARTIFICIAL SEQUENCE
  Engineered IL-6 binding polypeptide
VDAKYAKEERDAWYEIHLLPNLTVNQMAAFISKLFDDPSQSSELLSEAKKLNDSQAPK

SEQ ID NO: 236 - protein, 58 aa, ARTIFICIAL SEQUENCE
  Engineered IL-6 binding polypeptide
VDAKYAKEERDAWWEIHSLPNLTTQQMAAFIIKLYDDPSQSSELLSEAKKLNDSQAPK

SEQ ID NO: 237 - protein, 58 aa, ARTIFICIAL SEQUENCE
  Engineered IL-6 binding polypeptide
VDAKYAKEEARAWHEIHTLPNLTIEQMAAFISKLFDDPSQSSELLSEAKKLNDSQAPK

SEQ ID NO: 238 - protein, 58 aa, ARTIFICIAL SEQUENCE
  Engineered IL-6 binding polypeptide
VDAKYAKEERAAWYEIHLLPNLTVEQTAAFISKLFDDPSQSSELLSEAKKLNDSQAPK

SEQ ID NO: 239 - protein, 58 aa, ARTIFICIAL SEQUENCE
  Engineered IL-6 binding polypeptide
VDAKYAKEEREAWYEIHLLPNLTVEQIAAFISKLFDDPSQSSELLSEAKKLNDSQAPK

SEQ ID NO: 240 - protein, 58 aa, ARTIFICIAL SEQUENCE
  Engineered IL-6 binding polypeptide
VDAKYAKEEQHAWREIHLLPNLTTDQMAAFIQKLFDDPSQSSELLSEAKKLNDSQAPK

SEQ ID NO: 241 - protein, 58 aa, ARTIFICIAL SEQUENCE
  Engineered IL-6 binding polypeptide
VDAKYAKEEASAWWEIHLLPNLTTTQRAAFISKLFDDPSQSSELLSEAKKLNDSQAPK

SEQ ID NO: 242 - protein, 58 aa, ARTIFICIAL SEQUENCE
  Engineered IL-6 binding polypeptide
VDAKYAKEEATAWYEIHALPNLTVDQMVAFISKLFDDPSQSSELLSEAKKLNDSQAPK

SEQ ID NO: 243 - protein, 58 aa, ARTIFICIAL SEQUENCE
  Engineered IL-6 binding polypeptide
VDAKYAKEEHKAWTEIHLLPNLTVSQISAFISKLFDDPSQSSELLSEAKKLNDSQAPK

SEQ ID NO: 244 - protein, 58 aa, ARTIFICIAL SEQUENCE
  Engineered IL-6 binding polypeptide
VDAKYAKEEQAAWREIHTLPNLTIEQIAAFISKLFDDPSQSSELLSEAKKLNDSQAPK

SEQ ID NO: 245 - protein, 58 aa, ARTIFICIAL SEQUENCE
  Engineered IL-6 binding polypeptide
VDAKYAKEERAAWFEIHTLPNLTVNQMAAFISKLFDDPSQSSELLSEAKKLNDSQAPK

SEQ ID NO: 246 - protein, 58 aa, ARTIFICIAL SEQUENCE
  Engineered IL-6 binding polypeptide
VDAKYAKEEAAAWFEIHALPNLTVNQMAAFISKLFDDPSQSSELLSEAKKLNDSQAPK

SEQ ID NO: 247 - protein, 58 aa, ARTIFICIAL SEQUENCE
  Engineered IL-6 binding polypeptide
VDAKYAKEEAKAWFEIHKLPNLTAEQISAFIIKLFDDPSQSSELLSEAKKLNDSQAPK

SEQ ID NO: 248 - protein, 58 aa, ARTIFICIAL SEQUENCE
  Engineered IL-6 binding polypeptide
VDAKYAKEEREAWYEIHLLPNLTVQQIVAFIIKLFDDPSQSSELLSEAKKLNDSQAPK

SEQ ID NO: 249 - protein, 58 aa, ARTIFICIAL SEQUENCE
  Engineered IL-6 binding polypeptide
VDAKYAKEEQQAWYEIHLLPNLTIEQMAAFISKLFDDPSQSSELLSEAKKLNDSQAPK

SEQ ID NO: 250 - protein, 58 aa, ARTIFICIAL SEQUENCE
  Engineered IL-6 binding polypeptide
VDAKYAKEERDAWFEIHSLPNLTVDQMVAFISKLFDDPSQSSELLSEAKKLNDSQAPK

SEQ ID NO: 251 - protein, 58 aa, ARTIFICIAL SEQUENCE
  Engineered IL-6 binding polypeptide
VDAKYAKEEAEAWFEIHTLPNLTVQQMAAFISKLFDDPSQSSELLSEAKKLNDSQAPK

SEQ ID NO: 252 - protein, 58 aa, ARTIFICIAL SEQUENCE
  Engineered IL-6 binding polypeptide
VDAKYAKEEQKAWHEIHKLPNLTVDQTTAFISKLFDDPSQSSELLSEAKKLNDSQAPK

SEQ ID NO: 253 - protein, 58 aa, ARTIFICIAL SEQUENCE
  Engineered IL-6 binding polypeptide
VDAKYAKEEREAWYEIHLLPNLTIEQMVAFISKLFDDPSQSSELLSEAKKLNDSQAPK

SEQ ID NO: 254 - protein, 58 aa, ARTIFICIAL SEQUENCE
  Engineered IL-6 binding polypeptide
VDAKYAKEEAEAWFEIHTLPNLTVDQMAAFIVKLYDDPSQSSELLSEAKKLNDSQAPK

SEQ ID NO: 255 - protein, 58 aa, ARTIFICIAL SEQUENCE
  Engineered IL-6 binding polypeptide
VDAKYAKEEAEAWFEIHTLPNLTVTQIAAFISKLFDDPSQSSELLSEAKKLNDSQAPK

SEQ ID NO: 256 - protein, 58 aa, ARTIFICIAL SEQUENCE
  Engineered IL-6 binding polypeptide
VDAKYAKEERQAWYEIHALPNLTADQMAAFIQKLFDDPSQSSELLSEAKKLNDSQAPK

SEQ ID NO: 257 - protein, 58 aa, ARTIFICIAL SEQUENCE
  Engineered IL-6 binding polypeptide
VDAKYAKEEQSAWYEIHALPNLTVQQMEAFISKLFDDPSQSSELLSEAKKLNDSQAPK

SEQ ID NO: 258 - protein, 58 aa, ARTIFICIAL SEQUENCE
  Engineered IL-6 binding polypeptide
VDAKYAKEEADAWLEIHLLPNLTVEQMAAFISKLFDDPSQSSELLSEAKKLNDSQAPK

SEQ ID NO: 259 - protein, 58 aa, ARTIFICIAL SEQUENCE
  Engineered IL-6 binding polypeptide
VDAKYAKEEQQAWWEIHTLPNLTVDQRSAFIVKLYDDPSQSSELLSEAKKLNDSQAPK

SEQ ID NO: 260 - protein, 58 aa, ARTIFICIAL SEQUENCE
  Engineered IL-6 binding polypeptide
VDAKYAKEERKAWHEIHILPNLTVNQISAFIQKLFDDPSQSSELLSEAKKLNDSQAPK

SEQ ID NO: 261 - protein, 58 aa, ARTIFICIAL SEQUENCE
  Engineered IL-6 binding polypeptide
VDAKYAKEEAHAWWEIHKLPNLTTDQTAAFISKLFDDPSQSSELLSEAKKLNDSQAPK

SEQ ID NO: 262 - protein, 58 aa, ARTIFICIAL SEQUENCE
  Engineered IL-6 binding polypeptide
VDAKYAKEERDAWYEIHILPNLTVTQMAAFISKLFDDPSQSSELLSEAKKLNDSQAPK

SEQ ID NO: 263 - protein, 58 aa, ARTIFICIAL SEQUENCE
  Engineered IL-6 binding polypeptide
VDAKYAKEEAQAWREIHTLPNLTAQQMAAFISKLFDDPSQSSELLSEAKKLNDSQAPK

SEQ ID NO: 264 - protein, 58 aa, ARTIFICIAL SEQUENCE
  Engineered IL-6 binding polypeptide
VDAKYAKEERRAWHEIHVLPNLTVEQMAAFISKLFDDPSQSSELLSEAKKLNDSQAPK

SEQ ID NO: 265 - protein, 58 aa, ARTIFICIAL SEQUENCE
  Engineered IL-6 binding polypeptide
VDAKYAKEEREAWSEIHLLPNLTVTQMAAFISKLFDDPSQSSELLSEAKKLNDSQAPK

SEQ ID NO: 266 - protein, 58 aa, ARTIFICIAL SEQUENCE
  Engineered IL-6 binding polypeptide
VDAKYAKEERKAWYEIHLLPNLTVSQMAAFISKLFDDPSQSSELLSEAKKLNDSQAPK

SEQ ID NO: 267 - protein, 58 aa, ARTIFICIAL SEQUENCE
  Engineered IL-6 binding polypeptide
VDAKYAKEEARAWYEIHLLPNLTVTQMAAFISKLFDDPSQSSELLSEAKKLNDSQAPK

SEQ ID NO: 268 - protein, 58 aa, ARTIFICIAL SEQUENCE
  Engineered IL-6 binding polypeptide
VDAKYAKEEHEAWTEIHKLPNLTTEQMAAFISKLFDDPSQSSELLSEAKKLNDSQAPK

SEQ ID NO: 269 - protein, 58 aa, ARTIFICIAL SEQUENCE
  Engineered IL-6 binding polypeptide
VDAKYAKEERDAWFEIHSLPNLTVQQMAAFISKLFDDPSQSSELLSEAKKLNDSQAPK

SEQ ID NO: 270 - protein, 58 aa, ARTIFICIAL SEQUENCE
  Engineered IL-6 binding polypeptide
VDAKYAKEEQSAWHEIHLLPNLTVDQIAAFISKLFDDPSQSSELLSEAKKLNDSQAPK

SEQ ID NO: 271 - protein, 58 aa, ARTIFICIAL SEQUENCE
  Engineered IL-6 binding polypeptide
VDAKYAKEEQAAWYEIHALPNLTVDQMTAFISKLFDDPSQSSELLSEAKKLNDSQAPK

SEQ ID NO: 272 - protein, 58 aa, ARTIFICIAL SEQUENCE
  Engineered IL-6 binding polypeptide
VDAKYAKEEAAAWREIHLLPNLTTQQMAAFISKLFDDPSQSSELLSEAKKLNDSQAPK

SEQ ID NO: 273 - protein, 58 aa, ARTIFICIAL SEQUENCE
  Engineered IL-6 binding polypeptide
VDAKYAKEEREAWYEIHILPNLTVEQMAAFISKLFDDPSQSSELLSEAKKLNDSQAPK

SEQ ID NO: 274 - protein, 58 aa, ARTIFICIAL SEQUENCE
  Engineered IL-6 binding polypeptide
VDAKYAKEERKAWYEIHTLPNLTVDQMAAFISKLFDDPSQSSELLSEAKKLNDSQAPK

SEQ ID NO: 275 - protein, 58 aa, ARTIFICIAL SEQUENCE
  Engineered IL-6 binding polypeptide
VDAKYAKEEAKAWREIHLLPNLTVEQMAAFISKLFDDPSQSSELLSEAKKLNDSQAPK

SEQ ID NO: 276 - protein, 58 aa, ARTIFICIAL SEQUENCE
  Engineered IL-6 binding polypeptide
VDAKYAKEEAQAWSEIHMLPNLTVTQIAAFISKLFDDPSQSSELLSEAKKLNDSQAPK

SEQ ID NO: 277 - protein, 58 aa, ARTIFICIAL SEQUENCE
  Engineered IL-6 binding polypeptide
VDAKYAKEEAHAWHEIHILPNLTVDQMSAFISKLFDDPSQSSELLSEAKKLNDSQAPK

SEQ ID NO: 278 - protein, 58 aa, ARTIFICIAL SEQUENCE
  Engineered IL-6 binding polypeptide
VDAKYAKEEREAWFEIHLLPNLTVEQIAAFISKLFDDPSQSSELLSEAKKLNDSQAPK

SEQ ID NO: 279 - protein, 58 aa, ARTIFICIAL SEQUENCE
  Engineered IL-6 binding polypeptide
VDAKYAKEERKAWWEIHLLPNLTIEQMAAFISKLFDDPSQSSELLSEAKKLNDSQAPK

SEQ ID NO: 280 - protein, 58 aa, ARTIFICIAL SEQUENCE
  Engineered IL-6 binding polypeptide
VDAKYAKEERDAWYEIHTLPNLTVEQMVAFISKLFDDPSQSSELLSEAKKLNDSQAPK

SEQ ID NO: 281 - protein, 58 aa, ARTIFICIAL SEQUENCE
  Engineered IL-6 binding polypeptide
VDAKYAKEERKAWYEIHALPNLTVSQMAAFIIKLYDDPSQSSELLSEAKKLNDSQAPK

SEQ ID NO: 282 - protein, 58 aa, ARTIFICIAL SEQUENCE
  Engineered IL-6 binding polypeptide
VDAKYAKEEHKAWWEIHALPNLTISQITAFISKLFDDPSQSSELLSEAKKLNDSQAPK

SEQ ID NO: 283 - protein, 58 aa, ARTIFICIAL SEQUENCE
  Engineered IL-6 binding polypeptide
VDAKYAKEEAQAWYEIHLLPNLTIEQMAAFISKLFDDPSQSSELLSEAKKLNDSQAPK

SEQ ID NO: 284 - protein, 58 aa, ARTIFICIAL SEQUENCE
  Engineered IL-6 binding polypeptide
VDAKYAKEEQDAWWEIHALPNLTIDQMAAFISKLFDDPSQSSELLSEAKKLNDSQAPK

SEQ ID NO: 285 - protein, 58 aa, ARTIFICIAL SEQUENCE
  Engineered IL-6 binding polypeptide
VDAKYAKEEHDAWWEIHILPNLTVEQIAAFISKLFDDPSQSSELLSEAKKLNDSQAPK

SEQ ID NO: 286 - protein, 58 aa, ARTIFICIAL SEQUENCE
  Engineered IL-6 binding polypeptide
VDAKYAKEEARAWLEIHTLPNLTITQRAAFISKLFDDPSQSSELLSEAKKLNDSQAPK

SEQ ID NO: 287 - protein, 58 aa, ARTIFICIAL SEQUENCE
  Engineered IL-6 binding polypeptide
VDAKYAKEERKAWHEIHILPNLTINQRAAFISKLFDDPSQSSELLSEAKKLNDSQAPK

SEQ ID NO: 288 - protein, 58 aa, ARTIFICIAL SEQUENCE
  Engineered IL-6 binding polypeptide
VDAKYAKEEREAWYEIHMLPNLTVTQMAAFISKLFDDPSQSSELLSEAKKLNDSQAPK

SEQ ID NO: 289 - protein, 58 aa, ARTIFICIAL SEQUENCE
  Engineered IL-6 binding polypeptide
VDAKYAKEERDAWFEIHILPNLTIHQMAAFISKLFDDPSQSSELLSEAKKLNDSQAPK

SEQ ID NO: 290 - protein, 58 aa, ARTIFICIAL SEQUENCE
  Engineered IL-6 binding polypeptide
VDAKYAKEEHDAWYEIHTLPNLTVDQMVAFISKLFDDPSQSSELLSEAKKLNDSQAPK

SEQ ID NO: 291 - protein, 58 aa, ARTIFICIAL SEQUENCE
  Engineered IL-6 binding polypeptide
VDAKYAKEEAQAWYEIHTLPNLTVDQMAAFISKLFDDPSQSSELLSEAKKLNDSQAPK

SEQ ID NO: 292 - protein, 58 aa, ARTIFICIAL SEQUENCE
  Engineered IL-6 binding polypeptide
VDAKYAKEERVAWWEIHSLPNLTIDQRSAFISKLFDDPSQSSELLSEAKKLNDSQAPK

SEQ ID NO: 293 - protein, 58 aa, ARTIFICIAL SEQUENCE
  Engineered IL-6 binding polypeptide
VDAKYAKEEHEAWTEIHLLPNLTVSQIAAFISKLFDDPSQSSELLSEAKKLNDSQAPK

SEQ ID NO: 294 - protein, 58 aa, ARTIFICIAL SEQUENCE
  Engineered IL-6 binding polypeptide
VDAKYAKEEAQAWREIHLLPNLTVDQIAAFISKLFDDPSQSSELLSEAKKLNDSQAPK

SEQ ID NO: 295 - protein, 58 aa, ARTIFICIAL SEQUENCE
  Engineered IL-6 binding polypeptide
VDAKYAKEERDAWHEIHVLPNLTAEQMSAFISKLFDDPSQSSELLSEAKKLNDSQAPK

SEQ ID NO: 296 - protein, 58 aa, ARTIFICIAL SEQUENCE
  Engineered IL-6 binding polypeptide
VDAKYAKEEATAWFEIHTLPNLTVDQMAAFIIKLFDDPSQSSELLSEAKKLNDSQAPK

SEQ ID NO: 297 - protein, 58 aa, ARTIFICIAL SEQUENCE
  Engineered IL-6 binding polypeptide
VDAKYAKEERHAWFEIHTLPNLTVTQMAAFISKLFDDPSQSSELLSEAKKLNDSQAPK

SEQ ID NO: 298 - protein, 58 aa, ARTIFICIAL SEQUENCE
  Engineered IL-6 binding polypeptide
VDAKYAKEEREAWWEIHALPNLTTNQVAAFISKLFDDPSQSSELLSEAKKLNDSQAPK

SEQ ID NO: 299 - protein, 58 aa, ARTIFICIAL SEQUENCE
  Engineered IL-6 binding polypeptide
VDAKYAKEERRAWWEIHLLPNLTIQQIAAFISKLFDDPSQSSELLSEAKKLNDSQAPK

SEQ ID NO: 300 - protein, 58 aa, ARTIFICIAL SEQUENCE
  Engineered IL-6 binding polypeptide
VDAKYAKEEAHAWFEIHILPNLTIDQMAAFISKLFDDPSQSSELLSEAKKLNDSQAPK

SEQ ID NO: 301 - protein, 58 aa, ARTIFICIAL SEQUENCE
  Engineered IL-6 binding polypeptide
VDAKYAKEEARAWREIHLLPNLTVEQMAAFISKLFDDPSQSSELLSEAKKLNDSQAPK

SEQ ID NO: 302 - protein, 58 aa, ARTIFICIAL SEQUENCE
  Engineered IL-6 binding polypeptide
VDAKYAKEERRAWYEIHTLPNLTVEQLSAFISKLFDDPSQSSELLSEAKKLNDSQAPK

SEQ ID NO: 303 - protein, 58 aa, ARTIFICIAL SEQUENCE
  Engineered IL-6 binding polypeptide
VDAKYAKEEAHAWHEIHVLPNLTVEQIAAFISKLFDDPSQSSELLSEAKKLNDSQAPK

SEQ ID NO: 304 - protein, 58 aa, ARTIFICIAL SEQUENCE
  Engineered IL-6 binding polypeptide
VDAKYAKEEREAWFEIHTLPNLTVEQMAAFISKLFDDPSQSSELLSEAKKLNDSQAPK

SEQ ID NO: 305 - protein, 58 aa, ARTIFICIAL SEQUENCE
  Engineered IL-6 binding polypeptide
VDAKYAKEERDAWWEIHSLPNLTIDQMAAFISKLFDDPSQSSELLSEAKKLNDSQAPK

SEQ ID NO: 306 - protein, 58 aa, ARTIFICIAL SEQUENCE
  Engineered IL-6 binding polypeptide
VDAKYAKEEARAWHEIHILPNLTIQQITAFIQKLFDDPSQSSELLSEAKKLNDSQAPK

SEQ ID NO: 307 - protein, 58 aa, ARTIFICIAL SEQUENCE
  Engineered IL-6 binding polypeptide
VDAKYAKEEQKAWHEIHLLPNLTINQIVAFISKLFDDPSQSSELLSEAKKLNDSQAPK

SEQ ID NO: 308 - protein, 58 aa, ARTIFICIAL SEQUENCE
  Engineered IL-6 binding polypeptide
VDAKYAKEEREAWYEIHILPNLTVNQVAAFISKLFDDPSQSSELLSEAKKLNDSQAPK

SEQ ID NO: 309 - protein, 58 aa, ARTIFICIAL SEQUENCE
  Engineered IL-6 binding polypeptide
VDAKYAKEERVAWYEIHALPNLTVTQMAAFISKLFDDPSQSSELLSEAKKLNDSQAPK

SEQ ID NO: 310 - protein, 58 aa, ARTIFICIAL SEQUENCE
  Engineered IL-6 binding polypeptide
VDAKYAKEERVAWLEIHALPNLTVDQMAAFIIKLFDDPSQSSELLSEAKKLNDSQAPK

SEQ ID NO: 311 - protein, 58 aa, ARTIFICIAL SEQUENCE
  Engineered IL-6 binding polypeptide
VDAKYAKEERDAWFEIHMLPNLTVNQMAAFIIKLFDDPSQSSELLSEAKKLNDSQAPK

SEQ ID NO: 312 - protein, 58 aa, ARTIFICIAL SEQUENCE
  Engineered IL-6 binding polypeptide
VDAKYAKEEAVAWFEIHTLPNLTVEQMAAFIVKLFDDPSQSSELLSEAKKLNDSQAPK

SEQ ID NO: 313 - protein, 58 aa, ARTIFICIAL SEQUENCE
  Engineered IL-6 binding polypeptide
VDAKYAKEEQDAWSEIHLLPNLTVNQMAAFISKLFDDPSQSSELLSEAKKLNDSQAPK

SEQ ID NO: 314 - protein, 58 aa, ARTIFICIAL SEQUENCE
  Engineered IL-6 binding polypeptide
VDAKYAKEERDAWWEIHALPNLTVDQMVAFISKLFDDPSQSSELLSEAKKLNDSQAPK

SEQ ID NO: 315 - protein, 58 aa, ARTIFICIAL SEQUENCE
  Engineered IL-6 binding polypeptide
VDAKYAKEEAHAWHEIHVLPNLTVHQVAAFISKLFDDPSQSSELLSEAKKLNDSQAPK

SEQ ID NO: 316 - protein, 58 aa, ARTIFICIAL SEQUENCE
  Engineered IL-6 binding polypeptide
VDAKYAKEEREAWYEIHLLPNLTAEQMAAFISKLFDDPSQSSELLSEAKKLNDSQAPK

SEQ ID NO: 317 - protein, 58 aa, ARTIFICIAL SEQUENCE
  Engineered IL-6 binding polypeptide
VDAKYAKEEQEAWYEIHILPNLTISQMAAFISKLFDDPSQSSELLSEAKKLNDSQAPK

SEQ ID NO: 318 - protein, 58 aa, ARTIFICIAL SEQUENCE
  Engineered IL-6 binding polypeptide
VDAKYAKEERDAWYEIHTLPNLTVEQMAAFISKLFDDPSQSSELLSEAKKLNDSQAPK

SEQ ID NO: 319 - protein, 58 aa, ARTIFICIAL SEQUENCE
  Engineered IL-6 binding polypeptide
VDAKYAKEERQAWTEIHLLPNLTVTQMAAFISKLFDDPSQSSELLSEAKKLNDSQAPK

SEQ ID NO: 320 - protein, 58 aa, ARTIFICIAL SEQUENCE
  Engineered IL-6 binding polypeptide
VDAKYAKEERDAWLEIHLLPNLTVEQMAAFISKLFDDPSQSSELLSEAKKLNDSQAPK

SEQ ID NO: 321 - protein, 58 aa, ARTIFICIAL SEQUENCE
  Engineered IL-6 binding polypeptide
VDAKYAKEEQRAWTEIHTLPNLTVDQMAAFISKLFDDPSQSSELLSEAKKLNDSQAPK

SEQ ID NO: 322 - protein, 58 aa, ARTIFICIAL SEQUENCE
  Engineered IL-6 binding polypeptide
VDAKYAKEERKAWWEIHLLPNLTVDQITAFISKLFDDPSQSSELLSEAKKLNDSQAPK

SEQ ID NO: 323 - protein, 58 aa, ARTIFICIAL SEQUENCE
  Engineered IL-6 binding polypeptide
VDAKYAKEEARAWHEIHILPNLTVDQIAAFISKLFDDPSQSSELLSEAKKLNDSQAPK

SEQ ID NO: 324 - protein, 58 aa, ARTIFICIAL SEQUENCE
  Engineered IL-6 binding polypeptide
VDAKYAKEEREAWHEIHILPNLTVTQMAAFISKLFDDPSQSSELLSEAKKLNDSQAPK

SEQ ID NO: 325 - protein, 58 aa, ARTIFICIAL SEQUENCE
  Engineered IL-6 binding polypeptide
VDAKYAKEEQDAWWEIHKLPNLTTHQVAAFISKLFDDPSQSSELLSEAKKLNDSQAPK

SEQ ID NO: 326 - protein, 58 aa, ARTIFICIAL SEQUENCE
  Engineered IL-6 binding polypeptide
VDAKYAKEERRAWFEIHALPNLTTEQMAAFIWKLFDDPSQSSELLSEAKKLNDSQAPK

SEQ ID NO: 327 - protein, 58 aa, ARTIFICIAL SEQUENCE
  Engineered IL-6 binding polypeptide
VDAKYAKEEAAAWFEIHTLPNLTIEQMSAFISKLFDDPSQSSELLSEAKKLNDSQAPK

SEQ ID NO: 328 - protein, 58 aa, ARTIFICIAL SEQUENCE
  Engineered IL-6 binding polypeptide
VDAKYAKEEREAWFEIHLLPNLTIEQMAAFISKLFDDPSQSSELLSEAKKLNDSQAPK

SEQ ID NO: 329 - protein, 58 aa, ARTIFICIAL SEQUENCE
  Engineered IL-6 binding polypeptide
VDAKYAKEERKAWYEIHTLPNLTVNQMAAFISKLFDDPSQSSELLSEAKKLNDSQAPK

SEQ ID NO: 330 - protein, 58 aa, ARTIFICIAL SEQUENCE
  Engineered IL-6 binding polypeptide
VDAKYAKEERQAWLEIHLLPNLTIEQMAAFISKLFDDPSQSSELLSEAKKLNDSQAPK

SEQ ID NO: 331 - protein, 58 aa, ARTIFICIAL SEQUENCE
  Engineered IL-6 binding polypeptide
VDAKYAKEEHHAWLEIHTLPNLTVDQMAAFISKLFDDPSQSSELLSEAKKLNDSQAPK

SEQ ID NO: 332 - protein, 58 aa, ARTIFICIAL SEQUENCE
  Engineered IL-6 binding polypeptide
VDAKYAKEEQQAWWEIHKLPNLTVEQMTAFIIKLYDDPSQSSELLSEAKKLNDSQAPK

SEQ ID NO: 333 - protein, 58 aa, ARTIFICIAL SEQUENCE
  Engineered IL-6 binding polypeptide
VDAKYAKEERKAWFEIHALPNLTVTQVAAFISKLFDDPSQSSELLSEAKKLNDSQAPK

SEQ ID NO: 334 - protein, 58 aa, ARTIFICIAL SEQUENCE
  Engineered IL-6 binding polypeptide
VDAKYAKEEHRAWTEIHKLPNLTTQQMAAFISKLFDDPSQSSELLSEAKKLNDSQAPK

SEQ ID NO: 335 - protein, 58 aa, ARTIFICIAL SEQUENCE
  Engineered IL-6 binding polypeptide
VDAKYAKEEAQAWHEIHILPNLTVDQMAAFISKLFDDPSQSSELLSEAKKLNDSQAPK

SEQ ID NO: 336 - protein, 58 aa, ARTIFICIAL SEQUENCE
  Engineered IL-6 binding polypeptide
VDAKYAKEEQKAWFEIHLLPNLTVEQIAAFIQKLFDDPSQSSELLSEAKKLNDSQAPK

SEQ ID NO: 337 - protein, 58 aa, ARTIFICIAL SEQUENCE
  Engineered IL-6 binding polypeptide
VDAKYAKEERHAWYEIHLLPNLTVRQMAAFISKLFDDPSQSSELLSEAKKLNDSQAPK

SEQ ID NO: 338 - protein, 58 aa, ARTIFICIAL SEQUENCE
  Engineered IL-6 binding polypeptide
VDAKYAKEERDAWYEIHLLPNLTVNQIAAFISKLFDDPSQSSELLSEAKKLNDSQAPK

SEQ ID NO: 339 - protein, 58 aa, ARTIFICIAL SEQUENCE
  Engineered IL-6 binding polypeptide
VDAKYAKEEAHAWWEIHALPNLTVDQMAAFISKLFDDPSQSSELLSEAKKLNDSQAPK

SEQ ID NO: 340 - protein, 58 aa, ARTIFICIAL SEQUENCE
  Engineered IL-6 binding polypeptide
VDAKYAKEEADAWFEIHVLPNLTIQQIAAFISKLFDDPSQSSELLSEAKKLNDSQAPK

SEQ ID NO: 341 - protein, 58 aa, ARTIFICIAL SEQUENCE
  Engineered IL-6 binding polypeptide
VDAKYAKEERRAWFEIHILPNLTINQMAAFISKLFDDPSQSSELLSEAKKLNDSQAPK

SEQ ID NO: 342 - protein, 58 aa, ARTIFICIAL SEQUENCE
  Engineered IL-6 binding polypeptide
VDAKYAKEERKAWYEIHVLPNLTVRQMAAFIQKLFDDPSQSSELLSEAKKLNDSQAPK

SEQ ID NO: 343 - protein, 58 aa, ARTIFICIAL SEQUENCE
  Engineered IL-6 binding polypeptide
VDAKYAKEERHAWHEIHILPNLTVDQISAFISKLFDDPSQSSELLSEAKKLNDSQAPK

SEQ ID NO: 344 - protein, 58 aa, ARTIFICIAL SEQUENCE
  Engineered IL-6 binding polypeptide
VDAKYAKEERKAWLEIHLLPNLTVEQMAAFISKLFDDPSQSSELLSEAKKLNDSQAPK

SEQ ID NO: 345 - protein, 58 aa, ARTIFICIAL SEQUENCE
  Engineered IL-6 binding polypeptide
VDAKYAKEEREAWWEIHKLPNLTVTQMAAFISKLFDDPSQSSELLSEAKKLNDSQAPK

SEQ ID NO: 346 - protein, 58 aa, ARTIFICIAL SEQUENCE
  Engineered IL-6 binding polypeptide
VDAKYAKEERHAWYEIHTLPNLTVNQMAAFISKLFDDPSQSSELLSEAKKLNDSQAPK

SEQ ID NO: 347 - protein, 58 aa, ARTIFICIAL SEQUENCE
  Engineered IL-6 binding polypeptide
VDAKYAKEERHAWYEIHVLPNLTVQQMAAFIQKLFDDPSQSSELLSEAKKLNDSQAPK

SEQ ID NO: 348 - protein, 58 aa, ARTIFICIAL SEQUENCE
  Engineered IL-6 binding polypeptide
VDAKYAKEERHAWWEIHALPNLTVEQIAAFIQKLFDDPSQSSELLSEAKKLNDSQAPK

SEQ ID NO: 349 - protein, 58 aa, ARTIFICIAL SEQUENCE
  Engineered IL-6 binding polypeptide
VDAKYAKEEAAAWHEIHILPNLTVSQIAAFISKLFDDPSQSSELLSEAKKLNDSQAPK

SEQ ID NO: 350 - protein, 58 aa, ARTIFICIAL SEQUENCE
  Engineered IL-6 binding polypeptide
VDAKYAKEEASAWTEIHLLPNLTIDQMAAFIQKLFDDPSQSSELLSEAKKLNDSQAPK

SEQ ID NO: 351 - protein, 58 aa, ARTIFICIAL SEQUENCE
  Engineered IL-6 binding polypeptide
VDAKYAKEEQSAWYEIHILPNLTVDQIAAFISKLFDDPSQSSELLSEAKKLNDSQAPK

SEQ ID NO: 352 - protein, 58 aa, ARTIFICIAL SEQUENCE
  Engineered IL-6 binding polypeptide
VDAKYAKEEADAWYEIHLLPNLTVNQMAAFISKLFDDPSQSSELLSEAKKLNDSQAPK

SEQ ID NO: 353 - protein, 58 aa, ARTIFICIAL SEQUENCE
  Engineered IL-6 binding polypeptide
VDAKYAKEEQRAWFEIHTLPNLTVNQMAAFISKLFDDPSQSSELLSEAKKLNDSQAPK

SEQ ID NO: 354 - protein, 58 aa, ARTIFICIAL SEQUENCE
  Engineered IL-6 binding polypeptide
VDAKYAKEEAHAWYEIHILPNLTVSQIAAFISKLFDDPSQSSELLSEAKKLNDSQAPK

SEQ ID NO: 355 - protein, 58 aa, ARTIFICIAL SEQUENCE
  Engineered IL-6 binding polypeptide
VDAKYAKEEAAAWREIHSLPNLTTEQMAAFIMKLFDDPSQSSELLSEAKKLNDSQAPK

SEQ ID NO: 356 - protein, 58 aa, ARTIFICIAL SEQUENCE
  Engineered IL-6 binding polypeptide
VDAKYAKEEHQAWTEIHLLPNLTVQQITAFISKLFDDPSQSSELLSEAKKLNDSQAPK

SEQ ID NO: 357 - protein, 58 aa, ARTIFICIAL SEQUENCE
  Engineered IL-6 binding polypeptide
VDAKYAKEERKAWYEIHSLPNLTVSQMAAFISKLFDDPSQSSELLSEAKKLNDSQAPK

SEQ ID NO: 358 - protein, 58 aa, ARTIFICIAL SEQUENCE
  Engineered IL-6 binding polypeptide
VDAKYAKEEAHAWREIHVLPNLTVDQMAAFISKLFDDPSQSSELLSEAKKLNDSQAPK

SEQ ID NO: 359 - protein, 58 aa, ARTIFICIAL SEQUENCE
  Engineered IL-6 binding polypeptide
VDAKYAKEEAKAWTEIHLLPNLTVHQIAAFISKLFDDPSQSSELLSEAKKLNDSQAPK

SEQ ID NO: 360 - protein, 58 aa, ARTIFICIAL SEQUENCE
  Engineered IL-6 binding polypeptide
VDAKYAKEEREAWFEIHKLPNLTVTQMAAFIIKLFDDPSQSSELLSEAKKLNDSQAPK

SEQ ID NO: 361 - protein, 58 aa, ARTIFICIAL SEQUENCE
  Engineered IL-6 binding polypeptide
VDAKYAKEEADAWYEIHILPNLTVSQMAAFISKLFDDPSQSSELLSEAKKLNDSQAPK

SEQ ID NO: 362 - protein, 58 aa, ARTIFICIAL SEQUENCE
  Engineered IL-6 binding polypeptide
VDAKYAKEEARAWYEIHILPNLTVNQMAAFITKLFDDPSQSSELLSEAKKLNDSQAPK

SEQ ID NO: 363 - protein, 58 aa, ARTIFICIAL SEQUENCE
  Engineered IL-6 binding polypeptide
VDAKYAKEEREAWFEIHLLPNLTITQMAAFISKLFDDPSQSSELLSEAKKLNDSQAPK

SEQ ID NO: 364 - protein, 58 aa, ARTIFICIAL SEQUENCE
  Engineered IL-6 binding polypeptide
VDAKYAKEERDAWYEIHLLPNLTVTQMSAFISKLFDDPSQSSELLSEAKKLNDSQAPK

SEQ ID NO: 365 - protein, 58 aa, ARTIFICIAL SEQUENCE
  Engineered IL-6 binding polypeptide
VDAKYAKEEHEAWLEIHALPNLTVEQMSAFIIKLYDDPSQSSELLSEAKKLNDSQAPK

SEQ ID NO: 366 - protein, 58 aa, ARTIFICIAL SEQUENCE
  Engineered IL-6 binding polypeptide
VDAKYAKEEREAWFEIHLLPNLTVHQMAAFISKLFDDPSQSSELLSEAKKLNDSQAPK

SEQ ID NO: 367 - protein, 58 aa, ARTIFICIAL SEQUENCE
  Engineered IL-6 binding polypeptide
VDAKYAKEEHQAWTEIHLLPNLTTEQMAAFIQKLFDDPSQSSELLSEAKKLNDSQAPK

SEQ ID NO: 368 - protein, 58 aa, ARTIFICIAL SEQUENCE
  Engineered IL-6 binding polypeptide
VDAKYAKEEARAWYEIHVLPNLTTDQRSAFISKLFDDPSQSSELLSEAKKLNDSQAPK

SEQ ID NO: 369 - protein, 58 aa, ARTIFICIAL SEQUENCE
  Engineered IL-6 binding polypeptide
VDAKYAKEERDAWFEIHTLPNLTVSQMAAFISKLFDDPSQSSELLSEAKKLNDSQAPK

SEQ ID NO: 370 - protein, 58 aa, ARTIFICIAL SEQUENCE
  Engineered IL-6 binding polypeptide
VDAKYAKEERQAWFEIHSLPNLTVTQMAAFISKLFDDPSQSSELLSEAKKLNDSQAPK

SEQ ID NO: 371 - protein, 58 aa, ARTIFICIAL SEQUENCE
  Engineered IL-6 binding polypeptide
VDAKYAKEERQAWWEIHALPNLTAEQVAAFISKLFDDPSQSSELLSEAKKLNDSQAPK

SEQ ID NO: 372 - protein, 58 aa, ARTIFICIAL SEQUENCE
  Engineered IL-6 binding polypeptide
VDAKYAKEEAKAWYEIHTLPNLTVDQISAFIIKLFDDPSQSSELLSEAKKLNDSQAPK

SEQ ID NO: 373 - protein, 58 aa, ARTIFICIAL SEQUENCE
  Engineered IL-6 binding polypeptide
VDAKYAKEEREAWWEIHLLPNLTVDQISAFISKLFDDPSQSSELLSEAKKLNDSQAPK

SEQ ID NO: 374 - protein, 58 aa, ARTIFICIAL SEQUENCE
  Engineered IL-6 binding polypeptide
VDAKYAKEEADAWTEIHSLPNLTVEQMAAFIWKLLDDPSQSSELLSEAKKLNDSQAPK

SEQ ID NO: 375 - protein, 58 aa, ARTIFICIAL SEQUENCE
  Engineered IL-6 binding polypeptide
VDAKYAKEERAAWWEIHTLPNLTTDQRSAFIIKLYDDPSQSSELLSEAKKLNDSQAPK

SEQ ID NO: 376 - protein, 58 aa, ARTIFICIAL SEQUENCE
  Engineered IL-6 binding polypeptide
VDAKYAKEEHRAWTEIHLLPNLTTDQMAAFIIKLFDDPSQSSELLSEAKKLNDSQAPK

SEQ ID NO: 377 - protein, 58 aa, ARTIFICIAL SEQUENCE
  Engineered IL-6 binding polypeptide
VDAKYAKEEADAWWEIHMLPNLTTEQRSAFISKLFDDPSQSSELLSEAKKLNDSQAPK

SEQ ID NO: 378 - protein, 58 aa, ARTIFICIAL SEQUENCE
  Engineered IL-6 binding polypeptide
VDAKYAKEEREAWWEIHKLPNLTVEQVAAFISKLFDDPSQSSELLSEAKKLNDSQAPK

SEQ ID NO: 379 - protein, 58 aa, ARTIFICIAL SEQUENCE
  Engineered IL-6 binding polypeptide
VDAKYAKEEAHAWWEIHALPNLTVHQMAAFISKLFDDPSQSSELLSEAKKLNDSQAPK

SEQ ID NO: 380 - protein, 58 aa, ARTIFICIAL SEQUENCE
  Engineered IL-6 binding polypeptide
VDAKYAKEEAQAWREIHVLPNLTVQQIAAFISKLFDDPSQSSELLSEAKKLNDSQAPK

SEQ ID NO: 381 - protein, 58 aa, ARTIFICIAL SEQUENCE
  Engineered IL-6 binding polypeptide
VDAKYAKEERHAWWEIHKLPNLTVEQVAAFISKLFDDPSQSSELLSEAKKLNDSQAPK

SEQ ID NO: 382 - protein, 58 aa, ARTIFICIAL SEQUENCE
  Engineered IL-6 binding polypeptide
VDAKYAKEEAQAWWEIHKLPNLTVEQLAAFISKLFDDPSQSSELLSEAKKLNDSQAPK

SEQ ID NO: 383 - protein, 58 aa, ARTIFICIAL SEQUENCE
  Engineered IL-6 binding polypeptide
VDAKYAKEERKAWYEIHTLPNLTTDQVAAFISKLFDDPSQSSELLSEAKKLNDSQAPK

SEQ ID NO: 384 - protein, 58 aa, ARTIFICIAL SEQUENCE
  Engineered IL-6 binding polypeptide
VDAKYAKEEREAWHEIHLLPNLTIEQVAAFISKLFDDPSQSSELLSEAKKLNDSQAPK

SEQ ID NO: 385 - protein, 58 aa, ARTIFICIAL SEQUENCE
  Engineered IL-6 binding polypeptide
VDAKYAKEEQKAWWEIHLLPNLTTEQMAAFISKLFDDPSQSSELLSEAKKLNDSQAPK

SEQ ID NO: 386 - protein, 58 aa, ARTIFICIAL SEQUENCE
  Engineered IL-6 binding polypeptide
VDAKYAKEEQAAWLEIHLLPNLTVEQMAAFISKLFDDPSQSSELLSEAKKLNDSQAPK

SEQ ID NO: 387 - protein, 58 aa, ARTIFICIAL SEQUENCE
  Engineered IL-6 binding polypeptide
VDAKYAKEEREAWWEIHALPNLTTNQMAAFISKLFDDPSQSSELLSEAKKLNDSQAPK

SEQ ID NO: 388 - protein, 58 aa, ARTIFICIAL SEQUENCE
  Engineered IL-6 binding polypeptide
VDAKYAKEEAEAWYEIHILPNLTITQMAAFISKLFDDPSQSSELLSEAKKLNDSQAPK

SEQ ID NO: 389 - protein, 58 aa, ARTIFICIAL SEQUENCE
  Engineered IL-6 binding polypeptide
VDAKYAKEERQAWYEIHLLPNLTIEQMAAFISKLFDDPSQSSELLSEAKKLNDSQAPK

SEQ ID NO: 390 - protein, 58 aa, ARTIFICIAL SEQUENCE
  Engineered IL-6 binding polypeptide
VDAKYAKEEAKAWFEIHTLPNLTVTQMAAFISKLFDDPSQSSELLSEAKKLNDSQAPK

SEQ ID NO: 391 - protein, 58 aa, ARTIFICIAL SEQUENCE
  Engineered IL-6 binding polypeptide
VDAKYAKEEADAWWEIHSLPNLTVDQTAAFISKLFDDPSQSSELLSEAKKLNDSQAPK

SEQ ID NO: 392 - protein, 58 aa, ARTIFICIAL SEQUENCE
  Engineered IL-6 binding polypeptide
VDAKYAKEERVAWYEIHILPNLTVEQTAAFISKLFDDPSQSSELLSEAKKLNDSQAPK

SEQ ID NO: 393 - protein, 58 aa, ARTIFICIAL SEQUENCE
  Engineered IL-6 binding polypeptide
VDAKYAKEERKAWYEIHTLPNLTVDQMSAFISKLFDDPSQSSELLSEAKKLNDSQAPK

SEQ ID NO: 394 - protein, 58 aa, ARTIFICIAL SEQUENCE
  Engineered IL-6 binding polypeptide
VDAKYAKEEAQAWFEIHTLPNLTIEQMAAFIIKLYDDPSQSSELLSEAKKLNDSQAPK

SEQ ID NO: 395 - protein, 58 aa, ARTIFICIAL SEQUENCE
  Engineered IL-6 binding polypeptide
VDAKYAKEERQAWYEIHALPNLTVDQMAAFIIKLYDDPSQSSELLSEAKKLNDSQAPK

SEQ ID NO: 396 - protein, 58 aa, ARTIFICIAL SEQUENCE
  Engineered IL-6 binding polypeptide
VDAKYAKEEADAWFEIHVLPNLTTEQMTAFISKLFDDPSQSSELLSEAKKLNDSQAPK

SEQ ID NO: 397 - protein, 58 aa, ARTIFICIAL SEQUENCE
  Engineered IL-6 binding polypeptide
VDAKYAKEERRAWFEIHALPNLTVEQMAAFISKLFDDPSQSSELLSEAKKLNDSQAPK

SEQ ID NO: 398 - protein, 58 aa, ARTIFICIAL SEQUENCE
  Engineered IL-6 binding polypeptide
VDAKYAKEEAKAWYEIHSLPNLTVNQMAAFISKLFDDPSQSSELLSEAKKLNDSQAPK

SEQ ID NO: 399 - protein, 58 aa, ARTIFICIAL SEQUENCE
  Engineered IL-6 binding polypeptide
VDAKYAKEEARAWHEIHTLPNLTVHQMAAFIQKLFDDPSQSSELLSEAKKLNDSQAPK

SEQ ID NO: 400 - protein, 58 aa, ARTIFICIAL SEQUENCE
  Engineered IL-6 binding polypeptide
VDAKYAKEERRAWREIHTLPNLTVSQMAAFISKLFDDPSQSSELLSEAKKLNDSQAPK

SEQ ID NO: 401 - protein, 58 aa, ARTIFICIAL SEQUENCE
  Engineered IL-6 binding polypeptide
VDAKYAKEERAAWYEIHLLPNLTISQMAAFISKLFDDPSQSSELLSEAKKLNDSQAPK

SEQ ID NO: 402 - protein, 58 aa, ARTIFICIAL SEQUENCE
  Engineered IL-6 binding polypeptide
VDAKYAKEERKAWWEIHTLPNLTVSQMAAFISKLFDDPSQSSELLSEAKKLNDSQAPK

SEQ ID NO: 403 - protein, 58 aa, ARTIFICIAL SEQUENCE
  Engineered IL-6 binding polypeptide
VDAKYAKEERHAWYEIHMLPNLTIEQITAFISKLFDDPSQSSELLSEAKKLNDSQAPK

SEQ ID NO: 404 - protein, 58 aa, ARTIFICIAL SEQUENCE
  Engineered IL-6 binding polypeptide
VDAKYAKEEAQAWHEIHLLPNLTVEQMAAFIQKLFDDPSQSSELLSEAKKLNDSQAPK

SEQ ID NO: 405 - protein, 58 aa, ARTIFICIAL SEQUENCE
  Engineered IL-6 binding polypeptide
VDAKYAKEERKAWYEIHMLPNLTVDQIAAFISKLFDDPSQSSELLSEAKKLNDSQAPK

SEQ ID NO: 406 - protein, 58 aa, ARTIFICIAL SEQUENCE
  Engineered IL-6 binding polypeptide
VDAKYAKEEAHAWWEIHKLPNLTVEQVAAFISKLFDDPSQSSELLSEAKKLNDSQAPK

SEQ ID NO: 407 - protein, 58 aa, ARTIFICIAL SEQUENCE
  Engineered IL-6 binding polypeptide
VDAKYAKEERKAWWEIHLLPNLTVNQMAAFISKLFDDPSQSSELLSEAKKLNDSQAPK

SEQ ID NO: 408 - protein, 58 aa, ARTIFICIAL SEQUENCE
  Engineered IL-6 binding polypeptide
VDAKYAKEEREAWYEIHLLPNLTVSQMAAFISKLFDDPSQSSELLSEAKKLNDSQAPK

SEQ ID NO: 409 - protein, 58 aa, ARTIFICIAL SEQUENCE
  Engineered IL-6 binding polypeptide
VDAKYAKEEAKAWHEIHILPNLTVDQMAAFISKLFDDPSQSSELLSEAKKLNDSQAPK

SEQ ID NO: 410 - protein, 58 aa, ARTIFICIAL SEQUENCE
  Engineered IL-6 binding polypeptide
VDAKYAKEERHAWYEIHTLPNLTVEQMAAFIIKLFDDPSQSSELLSEAKKLNDSQAPK

SEQ ID NO: 411 - protein, 58 aa, ARTIFICIAL SEQUENCE
  Engineered IL-6 binding polypeptide
VDAKYAKEERHAWTEIHKLPNLTVQQMAAFISKLFDDPSQSSELLSEAKKLNDSQAPK

SEQ ID NO: 412 - protein, 58 aa, ARTIFICIAL SEQUENCE
  Engineered IL-6 binding polypeptide
VDAKYAKEERDAWHEIHTLPNLTVNQMAAFISKLFDDPSQSSELLSEAKKLNDSQAPK

SEQ ID NO: 413 - protein, 58 aa, ARTIFICIAL SEQUENCE
  Engineered IL-6 binding polypeptide
VDAKYAKEEREAWYEIHLLPNLTTNQRSAFISKLFDDPSQSSELLSEAKKLNDSQAPK

SEQ ID NO: 414 - protein, 58 aa, ARTIFICIAL SEQUENCE
  Engineered IL-6 binding polypeptide
VDAKYAKEEAVAWREIHLLPNLTVNQMAAFISKLFDDPSQSSELLSEAKKLNDSQAPK

SEQ ID NO: 415 - protein, 58 aa, ARTIFICIAL SEQUENCE
  Engineered IL-6 binding polypeptide
VDAKYAKEERAAWTEIHLLPNLTVDQIAAFISKLFDDPSQSSELLSEAKKLNDSQAPK

SEQ ID NO: 416 - protein, 58 aa, ARTIFICIAL SEQUENCE
  Engineered IL-6 binding polypeptide
VDAKYAKEEQAAWFEIHVLPNLTIEQRAAFISKLFDDPSQSSELLSEAKKLNDSQAPK

SEQ ID NO: 417 - protein, 58 aa, ARTIFICIAL SEQUENCE
  Engineered IL-6 binding polypeptide
VDAKYAKEERTAWWEIHALPNLTVEQIAAFISKLFDDPSQSSELLSEAKKLNDSQAPK

SEQ ID NO: 418 - protein, 58 aa, ARTIFICIAL SEQUENCE
  Engineered IL-6 binding polypeptide
VDAKYAKEEAEAWFEIHTLPNLTVDQRVAFIIKLFDDPSQSSELLSEAKKLNDSQAPK

SEQ ID NO: 419 - protein, 58 aa, ARTIFICIAL SEQUENCE
  Engineered IL-6 binding polypeptide
VDAKYAKEEREAWFEIHTLPNLTINQMAAFIIKLFDDPSQSSELLSEAKKLNDSQAPK

SEQ ID NO: 420 - protein, 58 aa, ARTIFICIAL SEQUENCE
  Engineered IL-6 binding polypeptide
VDAKYAKEERQAWFEIHALPNLTVQQRAAFISKLFDDPSQSSELLSEAKKLNDSQAPK

SEQ ID NO: 421 - protein, 58 aa, ARTIFICIAL SEQUENCE
  Engineered IL-6 binding polypeptide
VDAKYAKEEREAWHEIHLLPNLTIDQLAAFISKLFDDPSQSSELLSEAKKLNDSQAPK

SEQ ID NO: 422 - protein, 58 aa, ARTIFICIAL SEQUENCE
  Engineered IL-6 binding polypeptide
VDAKYAKEEHHAWWEIHALPNLTVDQVAAFIIKLYDDPSQSSELLSEAKKLNDSQAPK

SEQ ID NO: 423 - protein, 58 aa, ARTIFICIAL SEQUENCE
  Engineered IL-6 binding polypeptide
VDAKYAKEEAKAWYEIHILPNLTVTQITAFISKLFDDPSQSSELLSEAKKLNDSQAPK

SEQ ID NO: 424 - protein, 58 aa, ARTIFICIAL SEQUENCE
  Engineered IL-6 binding polypeptide
VDAKYAKEEQQAWFEIHTLPNLTVQQVTAFISKLFDDPSQSSELLSEAKKLNDSQAPK

SEQ ID NO: 425 - protein, 58 aa, ARTIFICIAL SEQUENCE
  Engineered IL-6 binding polypeptide
VDAKYAKEERTAWWEIHTLPNLTVTQMAAFISKLFDDPSQSSELLSEAKKLNDSQAPK

SEQ ID NO: 426 - protein, 58 aa, ARTIFICIAL SEQUENCE
  Engineered IL-6 binding polypeptide
VDAKYAKEERAAWYEIHLLPNLTVDQMSAFISKLFDDPSQSSELLSEAKKLNDSQAPK

SEQ ID NO: 427 - protein, 58 aa, ARTIFICIAL SEQUENCE
  Engineered IL-6 binding polypeptide
VDAKYAKEEQQAWWEIHALPNLTVDQITAFISKLFDDPSQSSELLSEAKKLNDSQAPK

SEQ ID NO: 428 - protein, 58 aa, ARTIFICIAL SEQUENCE
  Engineered IL-6 binding polypeptide
VDAKYAKEERRAWYEIHTLPNLTVSQMAAFIIKLFDDPSQSSELLSEAKKLNDSQAPK

SEQ ID NO: 429 - protein, 58 aa, ARTIFICIAL SEQUENCE
  Engineered IL-6 binding polypeptide
VDAKYAKEEQRAWTEIHMLPNLTANQMAAFISKLFDDPSQSSELLSEAKKLNDSQAPK

SEQ ID NO: 430 - protein, 58 aa, ARTIFICIAL SEQUENCE
  Engineered IL-6 binding polypeptide
VDAKYAKEEHEAWYEIHVLPNLTVNQISAFISKLFDDPSQSSELLSEAKKLNDSQAPK

SEQ ID NO: 431 - protein, 58 aa, ARTIFICIAL SEQUENCE
  Engineered IL-6 binding polypeptide
VDAKYAKEEADAWHEIHLLPNLTVEQMAAFIQKLFDDPSQSSELLSEAKKLNDSQAPK

SEQ ID NO: 432 - protein, 58 aa, ARTIFICIAL SEQUENCE
  Engineered IL-6 binding polypeptide
VDAKYAKEEREAWFEIHALPNLTVTQMAAFISKLFDDPSQSSELLSEAKKLNDSQAPK

SEQ ID NO: 433 - protein, 58 aa, ARTIFICIAL SEQUENCE
  Engineered IL-6 binding polypeptide
VDAKYAKEERDAWYEIHLLPNLTVEQMAAFIQKLFDDPSQSSELLSEAKKLNDSQAPK

SEQ ID NO: 434 - protein, 58 aa, ARTIFICIAL SEQUENCE
  Engineered IL-6 binding polypeptide
VDAKYAKEERKAWFEIHLLPNLTVTQMAAFISKLFDDPSQSSELLSEAKKLNDSQAPK

SEQ ID NO: 435 - protein, 58 aa, ARTIFICIAL SEQUENCE
  Engineered IL-6 binding polypeptide
VDAKYAKEEAEAWSEIHLLPNLTVEQMAAFISKLFDDPSQSSELLSEAKKLNDSQAPK

SEQ ID NO: 436 - protein, 58 aa, ARTIFICIAL SEQUENCE
  Engineered IL-6 binding polypeptide
VDAKYAKEERKAWYEIHSLPNLTVNQMAAFIIKLFDDPSQSSELLSEAKKLNDSQAPK

SEQ ID NO: 437 - protein, 58 aa, ARTIFICIAL SEQUENCE
  Engineered IL-6 binding polypeptide
VDAKYAKEEAAAWHEIHVLPNLTVDQMAAFIIKLYDDPSQSSELLSEAKKLNDSQAPK

SEQ ID NO: 438 - protein, 58 aa, ARTIFICIAL SEQUENCE
  Engineered IL-6 binding polypeptide
VDAKYAKEERHAWTEIHKLPNLTIQQITAFISKLFDDPSQSSELLSEAKKLNDSQAPK

SEQ ID NO: 439 - protein, 58 aa, ARTIFICIAL SEQUENCE
  Engineered IL-6 binding polypeptide
VDAKYAKEERRAWFEIHALPNLTVQQMVAFISKLFDDPSQSSELLSEAKKLNDSQAPK

SEQ ID NO: 440 - protein, 58 aa, ARTIFICIAL SEQUENCE
  Engineered IL-6 binding polypeptide
VDAKYAKEERDAWYEIHILPNLTVNQIAAFISKLFDDPSQSSELLSEAKKLNDSQAPK

SEQ ID NO: 441 - protein, 58 aa, ARTIFICIAL SEQUENCE
  Engineered IL-6 binding polypeptide
VDAKYAKEEAEAWHEIHVLPNLTVNQMAAFISKLFDDPSQSSELLSEAKKLNDSQAPK

SEQ ID NO: 442 - protein, 58 aa, ARTIFICIAL SEQUENCE
  Engineered IL-6 binding polypeptide
VDAKYAKEEARAWHEIHLLPNLTIQQMAAFISKLFDDPSQSSELLSEAKKLNDSQAPK

SEQ ID NO: 443 - protein, 58 aa, ARTIFICIAL SEQUENCE
  Engineered IL-6 binding polypeptide
VDAKYAKEEAQAWWEIHALPNLTVDQTAAFIIKLFDDPSQSSELLSEAKKLNDSQAPK

SEQ ID NO: 444 - protein, 58 aa, ARTIFICIAL SEQUENCE
  Engineered IL-6 binding polypeptide
VDAKYAKEEADAWFEIHTLPNLTVEQIAAFISKLFDDPSQSSELLSEAKKLNDSQAPK

SEQ ID NO: 445 - protein, 58 aa, ARTIFICIAL SEQUENCE
  Engineered IL-6 binding polypeptide
VDAKYAKEEAAAWYEIHILPNLTVQQMAAFISKLFDDPSQSSELLSEAKKLNDSQAPK

SEQ ID NO: 446 - protein, 58 aa, ARTIFICIAL SEQUENCE
  Engineered IL-6 binding polypeptide
VDAKYAKEEAEAWFEIHVLPNLTVSQIAAFISKLFDDPSQSSELLSEAKKLNDSQAPK

SEQ ID NO: 447 - protein, 58 aa, ARTIFICIAL SEQUENCE
  Engineered IL-6 binding polypeptide
VDAKYAKEEQSAWYEIHLLPNLTTNQLTAFISKLFDDPSQSSELLSEAKKLNDSQAPK

SEQ ID NO: 448 - protein, 58 aa, ARTIFICIAL SEQUENCE
  Engineered IL-6 binding polypeptide
VDAKYAKEEARAWYEIHTLPNLTATQMAAFISKLFDDPSQSSELLSEAKKLNDSQAPK

SEQ ID NO: 449 - protein, 58 aa, ARTIFICIAL SEQUENCE
  Engineered IL-6 binding polypeptide
VDAKYAKEEADAWWEIHALPNLTVDQVTAFIIKLYDDPSQSSELLSEAKKLNDSQAPK

SEQ ID NO: 450 - protein, 58 aa, ARTIFICIAL SEQUENCE
  Engineered IL-6 binding polypeptide
VDAKYAKEEAHAWREIHILPNLTVNQMAAFISKLFDDPSQSSELLSEAKKLNDSQAPK

SEQ ID NO: 451 - protein, 58 aa, ARTIFICIAL SEQUENCE
  Engineered IL-6 binding polypeptide
VDAKYAKEEAQAWHEIHLLPNLTVHQMAAFISKLFDDPSQSSELLSEAKKLNDSQAPK

SEQ ID NO: 452 - protein, 58 aa, ARTIFICIAL SEQUENCE
  Engineered IL-6 binding polypeptide
VDAKYAKEEARAWHEIHILPNLTTDQMAAFISKLFDDPSQSSELLSEAKKLNDSQAPK

SEQ ID NO: 453 - protein, 58 aa, ARTIFICIAL SEQUENCE
  Engineered IL-6 binding polypeptide
VDAKYAKEERHAWHEIHILPNLTVDQMAAFISKLFDDPSQSSELLSEAKKLNDSQAPK

SEQ ID NO: 454 - protein, 58 aa, ARTIFICIAL SEQUENCE
  Engineered IL-6 binding polypeptide
VDAKYAKEERHAWREIHLLPNLTVNQMAAFISKLFDDPSQSSELLSEAKKLNDSQAPK

SEQ ID NO: 455 - protein, 58 aa, ARTIFICIAL SEQUENCE
  Engineered IL-6 binding polypeptide
VDAKYAKEERTAWWEIHALPNLTVSQVAAFISKLFDDPSQSSELLSEAKKLNDSQAPK

SEQ ID NO: 456 - protein, 58 aa, ARTIFICIAL SEQUENCE
  Engineered IL-6 binding polypeptide
VDAKYAKEERHAWYEIHILPNLTVDQMAAFITKLFDDPSQSSELLSEAKKLNDSQAPK

SEQ ID NO: 457 - protein, 58 aa, ARTIFICIAL SEQUENCE
  Engineered IL-6 binding polypeptide
VDAKYAKEEQRAWREIHLLPNLTVDQMAAFISKLFDDPSQSSELLSEAKKLNDSQAPK

SEQ ID NO: 458 - protein, 58 aa, ARTIFICIAL SEQUENCE
  Engineered IL-6 binding polypeptide
VDAKYAKEERQAWYEIHVLPNLTVHQMAAFISKLFDDPSQSSELLSEAKKLNDSQAPK

SEQ ID NO: 459 - protein, 58 aa, ARTIFICIAL SEQUENCE
  Engineered IL-6 binding polypeptide
VDAKYAKEEAQAWHEIHTLPNLTVSQMAAFISKLFDDPSQSSELLSEAKKLNDSQAPK

SEQ ID NO: 460 - protein, 58 aa, ARTIFICIAL SEQUENCE
  Engineered IL-6 binding polypeptide
VDAKYAKEEREAWLEIHLLPNLTIDQMSAFISKLFDDPSQSSELLSEAKKLNDSQAPK

SEQ ID NO: 461 - protein, 58 aa, ARTIFICIAL SEQUENCE
  Engineered IL-6 binding polypeptide
VDAKYAKEEHRAWFEIHLLPNLTTEQMAAFISKLFDDPSQSSELLSEAKKLNDSQAPK

SEQ ID NO: 462 - protein, 58 aa, ARTIFICIAL SEQUENCE
  Engineered IL-6 binding polypeptide
VDAKYAKEERRAWYEIHLLPNLTTDQMAAFISKLFDDPSQSSELLSEAKKLNDSQAPK

SEQ ID NO: 463 - protein, 58 aa, ARTIFICIAL SEQUENCE
  Engineered IL-6 binding polypeptide
VDAKYAKEEREAWYEIHILPNLTVSQIAAFISKLFDDPSQSSELLSEAKKLNDSQAPK

SEQ ID NO: 464 - protein, 58 aa, ARTIFICIAL SEQUENCE
  Engineered IL-6 binding polypeptide
VDAKYAKEERDAWYEIHILPNLTVDQMAAFISKLFDDPSQSSELLSEAKKLNDSQAPK

SEQ ID NO: 465 - protein, 58 aa, ARTIFICIAL SEQUENCE
  Engineered IL-6 binding polypeptide
VDAKYAKEERDAWYEIHLLPNLTVSQMAAFISKLFDDPSQSSELLSEAKKLNDSQAPK

SEQ ID NO: 466 - protein, 58 aa, ARTIFICIAL SEQUENCE
  Engineered IL-6 binding polypeptide
VDAKYAKEERTAWFEIHSLPNLTAEQMAAFIIKLYDDPSQSSELLSEAKKLNDSQAPK

SEQ ID NO: 467 - protein, 58 aa, ARTIFICIAL SEQUENCE
  Engineered IL-6 binding polypeptide
VDAKYAKEEHRAWLEIHTLPNLTVDQMAAFISKLFDDPSQSSELLSEAKKLNDSQAPK

SEQ ID NO: 468 - protein, 58 aa, ARTIFICIAL SEQUENCE
  Engineered IL-6 binding polypeptide
VDAKYAKEEHAAWYEIHLLPNLTVSQISAFIQKLFDDPSQSSELLSEAKKLNDSQAPK

SEQ ID NO: 469 - protein, 58 aa, ARTIFICIAL SEQUENCE
  Engineered IL-6 binding polypeptide
VDAKYAKEEADAWYEIHALPNLTVDQMAAFISKLFDDPSQSSELLSEAKKLNDSQAPK

SEQ ID NO: 470 - protein, 58 aa, ARTIFICIAL SEQUENCE
  Engineered IL-6 binding polypeptide
VDAKYAKEEAEAWWEIHTLPNLTVDQMAAFISKLFDDPSQSSELLSEAKKLNDSQAPK

SEQ ID NO: 471 - protein, 58 aa, ARTIFICIAL SEQUENCE
  Engineered IL-6 binding polypeptide
VDAKYAKEEAEAWWEIHKLPNLTVEQMTAFIIKLYDDPSQSSELLSEAKKLNDSQAPK

SEQ ID NO: 472 - protein, 58 aa, ARTIFICIAL SEQUENCE
  Engineered IL-6 binding polypeptide
VDAKYAKEEHHAWREIHILPNLTVEQMAAFIIKLFDDPSQSSELLSEAKKLNDSQAPK

SEQ ID NO: 473 - protein, 58 aa, ARTIFICIAL SEQUENCE
  Engineered IL-6 binding polypeptide
VDAKYAKEEREAWYEIHLLPNLTIQQMAAFISKLFDDPSQSSELLSEAKKLNDSQAPK

SEQ ID NO: 474 - protein, 58 aa, ARTIFICIAL SEQUENCE
  Engineered IL-6 binding polypeptide
VDAKYAKEEHAAWLEIHLLPNLTIDQMAAFISKLFDDPSQSSELLSEAKKLNDSQAPK

SEQ ID NO: 475 - protein, 58 aa, ARTIFICIAL SEQUENCE
  Engineered IL-6 binding polypeptide
VDAKYAKEERAAWYEIHLLPNLTIHQMAAFISKLFDDPSQSSELLSEAKKLNDSQAPK

SEQ ID NO: 476 - protein, 58 aa, ARTIFICIAL SEQUENCE
  Engineered IL-6 binding polypeptide
VDAKYAKEERTAWYEIHLLPNLTVHQMAAFISKLFDDPSQSSELLSEAKKLNDSQAPK

SEQ ID NO: 477 - protein, 58 aa, ARTIFICIAL SEQUENCE
  Engineered IL-6 binding polypeptide
VDAKYAKEERHAWHEIHSLPNLTIDQLTAFISKLFDDPSQSSELLSEAKKLNDSQAPK

SEQ ID NO: 478 - protein, 58 aa, ARTIFICIAL SEQUENCE
  Engineered IL-6 binding polypeptide
VDAKYAKEEREAWYEIHSLPNLTVDQVAAFISKLFDDPSQSSELLSEAKKLNDSQAPK

SEQ ID NO: 479 - protein, 58 aa, ARTIFICIAL SEQUENCE
  Engineered IL-6 binding polypeptide
VDAKYAKEEHHAWHEIHTLPNLTVHQMAAFISKLFDDPSQSSELLSEAKKLNDSQAPK

SEQ ID NO: 480 - protein, 58 aa, ARTIFICIAL SEQUENCE
  Engineered IL-6 binding polypeptide
VDAKYAKEEAHAWHEIHLLPNLTVEQMAAFISKLFDDPSQSSELLSEAKKLNDSQAPK

SEQ ID NO: 481 - protein, 58 aa, ARTIFICIAL SEQUENCE
  Engineered IL-6 binding polypeptide
VDAKYAKEEAHAWWEIHKLPNLTVNQVAAFISKLFDDPSQSSELLSEAKKLNDSQAPK

SEQ ID NO: 482 - protein, 58 aa, ARTIFICIAL SEQUENCE
  Engineered IL-6 binding polypeptide
VDAKYAKEEARAWYEIHILPNLTVTQMAAFISKLFDDPSQSSELLSEAKKLNDSQAPK

SEQ ID NO: 483 - protein, 58 aa, ARTIFICIAL SEQUENCE
  Engineered IL-6 binding polypeptide
VDAKYAKEEARAWWEIHLLPNLTVDQISAFISKLFDDPSQSSELLSEAKKLNDSQAPK

SEQ ID NO: 484 - protein, 58 aa, ARTIFICIAL SEQUENCE
  Engineered IL-6 binding polypeptide
VDAKYAKEEHDAWFEIHLLPNLTVEQIAAFISKLFDDPSQSSELLSEAKKLNDSQAPK

SEQ ID NO: 485 - protein, 58 aa, ARTIFICIAL SEQUENCE
  Engineered IL-6 binding polypeptide
VDAKYAKEEHTAWYEIHLLPNLTVDQMAAFISKLFDDPSQSSELLSEAKKLNDSQAPK

SEQ ID NO: 486 - protein, 58 aa, ARTIFICIAL SEQUENCE
  Engineered IL-6 binding polypeptide
VDAKYAKEEREAWWEIHALPNLTVNQMAAFIIKLFDDPSQSSELLSEAKKLNDSQAPK

SEQ ID NO: 487 - protein, 58 aa, ARTIFICIAL SEQUENCE
  Engineered IL-6 binding polypeptide
VDAKYAKEERDAWYEISTLPNLTVEQAAAFISKLFDDPSQSSELLSEAKKLNDSQAPK

SEQ ID NO: 488 - protein, 58 aa, ARTIFICIAL SEQUENCE
  Engineered IL-6 binding polypeptide
VDAKYAKEEREAWYEIHLLPNLTITQMAAFISKLFDDPSQSSELLSEAKKLNDSQAPK

SEQ ID NO: 489 - protein, 58 aa, ARTIFICIAL SEQUENCE
  Engineered IL-6 binding polypeptide
VDAKYAKEEAKAWFEIHTLPNLTVDQVAAFISKLFDDPSQSSELLSEAKKLNDSQAPK

SEQ ID NO: 490 - protein, 58 aa, ARTIFICIAL SEQUENCE
  Engineered IL-6 binding polypeptide
VDAKYAKEERQAWWEIHTLPNLTVEQMSAFISKLYDDPSQSSELLSEAKKLNDSQAPK

SEQ ID NO: 491 - protein, 58 aa, ARTIFICIAL SEQUENCE
  Engineered IL-6 binding polypeptide
VDAKYAKEEHEAWHEIHILPNLTIDQMAAFISKLFDDPSQSSELLSEAKKLNDSQAPK

SEQ ID NO: 492 - protein, 58 aa, ARTIFICIAL SEQUENCE
  Engineered IL-6 binding polypeptide
VDAKYAKEERDAWFEIHLLPNLTVEQMAAFISKLFDDPSQSSELLSEAKKLNDSQAPK

SEQ ID NO: 493 - protein, 58 aa, ARTIFICIAL SEQUENCE
  Engineered IL-6 binding polypeptide
VDAKYAKEEAKAWWEIHSLPNLTVNQMAAFISKLFDDPSQSSELLSEAKKLNDSQAPK

SEQ ID NO: 494 - protein, 58 aa, ARTIFICIAL SEQUENCE
  Engineered IL-6 binding polypeptide
VDAKYAKEEARAWWEIHLLPNLTIDQMAAFISKLFDDPSQSSELLSEAKKLNDSQAPK

SEQ ID NO: 495 - protein, 58 aa, ARTIFICIAL SEQUENCE
  Engineered IL-6 binding polypeptide
VDAKYAKEEQKAWWEIHSLPNLTVDQITAFISKLFDDPSQSSELLSEAKKLNDSQAPK

SEQ ID NO: 496 - protein, 58 aa, ARTIFICIAL SEQUENCE
  Engineered IL-6 binding polypeptide
VDAKYAKEEREAWYEIHLLPNLTVSQIAAFISKLFDDPSQSSELLSEAKKLNDSQAPK

SEQ ID NO: 497 - protein, 58 aa, ARTIFICIAL SEQUENCE
  Engineered IL-6 binding polypeptide
VDAKYAKEERRAWHEIQTLPNLTVRQMAAFISKLFDDPSQSSELLSEAKKLNDSQAPK

SEQ ID NO: 498 - protein, 58 aa, ARTIFICIAL SEQUENCE
  Engineered IL-6 binding polypeptide
VDAKYAKEERQAWYEIHTLPNLTATQMAAFIQKLFDDPSQSSELLSEAKKLNDSQAPK

SEQ ID NO: 499 - protein, 58 aa, ARTIFICIAL SEQUENCE
  Engineered IL-6 binding polypeptide
VDAKYAKEERHAWTEIHLLPNLTVNQMAAFIIKLFDDPSQSSELLSEAKKLNDSQAPK

SEQ ID NO: 500 - protein, 58 aa, ARTIFICIAL SEQUENCE
  Engineered IL-6 binding polypeptide
VDAKYAKEEARAWHEIHVLPNLTVNQMTAFISKLFDDPSQSSELLSEAKKLNDSQAPK

SEQ ID NO: 501 - protein, 58 aa, ARTIFICIAL SEQUENCE
  Engineered IL-6 binding polypeptide
VDAKYAKEEAEAWYEIHILPNLTVNQIAAFISKLFDDPSQSSELLSEAKKLNDSQAPK

SEQ ID NO: 502 - protein, 58 aa, ARTIFICIAL SEQUENCE
  Engineered IL-6 binding polypeptide
VDAKYAKEEAEAWREIHLLPNLTVDQMAAFISKLFDDPSQSSELLSEAKKLNDSQAPK

SEQ ID NO: 503 - protein, 58 aa, ARTIFICIAL SEQUENCE
  Engineered IL-6 binding polypeptide
VDAKYAKEERSAWFEIHTLPNLTVDQMAAFISKLFDDPSQSSELLSEAKKLNDSQAPK

SEQ ID NO: 504 - protein, 58 aa, ARTIFICIAL SEQUENCE
  Engineered IL-6 binding polypeptide
VDAKYAKEEAQAWYEIHALPNLTVEQMAAFISKLFDDPSQSSELLSEAKKLNDSQAPK

SEQ ID NO: 505 - protein, 58 aa, ARTIFICIAL SEQUENCE
  Engineered IL-6 binding polypeptide
VDAKYAKEERTAWWEIHALPNLTVNQVTAFISKLFDDPSQSSELLSEAKKLNDSQAPK

SEQ ID NO: 506 - protein, 58 aa, ARTIFICIAL SEQUENCE
  Engineered IL-6 binding polypeptide
VDAKYAKEEAEAWFEIHVLPNLTTDQRVAFITKLFDDPSQSSELLSEAKKLNDSQAPK

SEQ ID NO: 507 - protein, 58 aa, ARTIFICIAL SEQUENCE
  Engineered IL-6 binding polypeptide
VDAKYAKEEAEAWYEIHVLPNLTVDQMAAFIQKLFDDPSQSSELLSEAKKLNDSQAPK

SEQ ID NO: 508 - protein, 58 aa, ARTIFICIAL SEQUENCE
  Engineered IL-6 binding polypeptide
VDAKYAKEEREAWLEIHLLPNLTVEQMAAFISKLFDDPSQSSELLSEAKKLNDSQAPK

SEQ ID NO: 509 - protein, 58 aa, ARTIFICIAL SEQUENCE
  Engineered IL-6 binding polypeptide
VDAKYAKEERAAWWEIHSLPNLTVSQMAAFISKLFDDPSQSSELLSEAKKLNDSQAPK

SEQ ID NO: 510 - protein, 58 aa, ARTIFICIAL SEQUENCE
  Engineered IL-6 binding polypeptide
VDAKYAKEEAKAWREIHLLPNLTVNQMAAFISKLFDDPSQSSELLSEAKKLNDSQAPK

SEQ ID NO: 511 - protein, 58 aa, ARTIFICIAL SEQUENCE
  Engineered IL-6 binding polypeptide
VDAKYAKEERQAWWEIHALPNLTVTQMAAFISKLFDDPSQSSELLSEAKKLNDSQAPK

SEQ ID NO: 512 - protein, 58 aa, ARTIFICIAL SEQUENCE
  Engineered IL-6 binding polypeptide
VDAKYAKEERDAWFEIHTLPNLTVDQMAAFIQKLFDDPSQSSELLSEAKKLNDSQAPK

SEQ ID NO: 513 - protein, 58 aa, ARTIFICIAL SEQUENCE
  Engineered IL-6 binding polypeptide
VDAKYAKEERRAWYEIHSLPNLTVNQMAAFISKLFDDPSQSSELLSEAKKLNDSQAPK

SEQ ID NO: 514 - protein, 58 aa, ARTIFICIAL SEQUENCE
  Engineered IL-6 binding polypeptide
VDAKYAKEEHQAWHEIHLLPNLTVSQMAAFIQKLFDDPSQSSELLSEAKKLNDSQAPK

SEQ ID NO: 515 - protein, 58 aa, ARTIFICIAL SEQUENCE
  Engineered IL-6 binding polypeptide
VDAKYAKEERHAWFEIHKLPNLTTDQIAAFISKLFDDPSQSSELLSEAKKLNDSQAPK

SEQ ID NO: 516 - protein, 58 aa, ARTIFICIAL SEQUENCE
  Engineered IL-6 binding polypeptide
VDAKYAKEEAHAWHEIHLLPNLTIDQMAAFIMKLFDDPSQSSELLSEAKKLNDSQAPK

SEQ ID NO: 517 - protein, 58 aa, ARTIFICIAL SEQUENCE
  Engineered IL-6 binding polypeptide
VDAKYAKEERAAWYEIHLLPNLTIEQMSAFISKLFDDPSQSSELLSEAKKLNDSQAPK

SEQ ID NO: 518 - protein, 58 aa, ARTIFICIAL SEQUENCE
  Engineered IL-6 binding polypeptide
VDAKYAKEEAKAWFEIHALPNLTTTQMAAFISKLFDDPSQSSELLSEAKKLNDSQAPK

SEQ ID NO: 519 - protein, 58 aa, ARTIFICIAL SEQUENCE
  Engineered IL-6 binding polypeptide
VDAKYAKEERKAWYEIHILPNLTVDQMAAFISKLFDDPSQSSELLSEAKKLNDSQAPK

SEQ ID NO: 520 - protein, 58 aa, ARTIFICIAL SEQUENCE
  Engineered IL-6 binding polypeptide
VDAKYAKEERQAWHEIHILPNLTITQRTAFISKLFDDPSQSSELLSEAKKLNDSQAPK

SEQ ID NO: 521 - protein, 58 aa, ARTIFICIAL SEQUENCE
  Engineered IL-6 binding polypeptide
VDAKYAKEERRAWYEIHTLPNLTITQMAAFIQKLFDDPSQSSELLSEAKKLNDSQAPK

SEQ ID NO: 522 - protein, 58 aa, ARTIFICIAL SEQUENCE
  Engineered IL-6 binding polypeptide
VDAKYAKEEAEAWLEIHLLPNLTVSQMAAFIWKLFDDPSQSSELLSEAKKLNDSQAPK

SEQ ID NO: 523 - protein, 58 aa, ARTIFICIAL SEQUENCE
  Engineered IL-6 binding polypeptide
VDAKYAKEEAHAWWEIHALPNLTTNQMAAFISKLFDDPSQSSELLSEAKKLNDSQAPK

SEQ ID NO: 524 - protein, 58 aa, ARTIFICIAL SEQUENCE
  Engineered IL-6 binding polypeptide
VDAKYAKEERHAWTEIHKLPNLTINQMVAFIIKLFDDPSQSSELLSEAKKLNDSQAPK

SEQ ID NO: 525 - protein, 58 aa, ARTIFICIAL SEQUENCE
  Engineered IL-6 binding polypeptide
VDAKYAKEERQAWTEIHLLPNLTVDQMAAFISKLFDDPSQSSELLSEAKKLNDSQAPK

SEQ ID NO: 526 - protein, 58 aa, ARTIFICIAL SEQUENCE
  Engineered IL-6 binding polypeptide
VDAKYAKEEAHAWHEIHILPNLTVRQMAAFISKLFDDPSQSSELLSEAKKLNDSQAPK

SEQ ID NO: 527 - protein, 58 aa, ARTIFICIAL SEQUENCE
  Engineered IL-6 binding polypeptide
VDAKYAKEERQAWHEIHTLPNLTVNQMAAFISKLFDDPSQSSELLSEAKKLNDSQAPK

SEQ ID NO: 528 - protein, 58 aa, ARTIFICIAL SEQUENCE
  Engineered IL-6 binding polypeptide
VDAKYAKEERHAWWEIHKLPNLTVNQMAAFISKLFDDPSQSSELLSEAKKLNDSQAPK

SEQ ID NO: 529 - protein, 58 aa, ARTIFICIAL SEQUENCE
  Engineered IL-6 binding polypeptide
VDAKYAKEEAKAWFEIHKLPNLTANQMAAFIIKLYDDPSQSSELLSEAKKLNDSQAPK

SEQ ID NO: 530 - protein, 58 aa, ARTIFICIAL SEQUENCE
  Engineered IL-6 binding polypeptide
VDAKYAKEEREAWYEIHILPNLTVQQRVAFISKLFDDPSQSSELLSEAKKLNDSQAPK

SEQ ID NO: 531 - protein, 58 aa, ARTIFICIAL SEQUENCE
  Engineered IL-6 binding polypeptide
VDAKYAKEEQEAWHEIHILPNLTVTQMTAFISKLFDDPSQSSELLSEAKKLNDSQAPK

SEQ ID NO: 532 - protein, 58 aa, ARTIFICIAL SEQUENCE
  Engineered IL-6 binding polypeptide
VDAKYAKEERQAWFEIHVLPNLTIEQMAAFISKLFDDPSQSSELLSEAKKLNDSQAPK

SEQ ID NO: 533 - protein, 58 aa, ARTIFICIAL SEQUENCE
  Engineered IL-6 binding polypeptide
VDAKYAKEERQAWYEIHKLPNLTVSQMTAFISKLFDDPSQSSELLSEAKKLNDSQAPK

SEQ ID NO: 534 - protein, 58 aa, ARTIFICIAL SEQUENCE
  Engineered IL-6 binding polypeptide
VDAKYAKEEREAWWEIHLLPNLTIDQMAAFIQKLFDDPSQSSELLSEAKKLNDSQAPK

SEQ ID NO: 535 - protein, 58 aa, ARTIFICIAL SEQUENCE
  Engineered IL-6 binding polypeptide
VDAKYAKEERDAWYEIHTLPNLTVHQMAAFISKLFDDPSQSSELLSEAKKLNDSQAPK

SEQ ID NO: 536 - protein, 58 aa, ARTIFICIAL SEQUENCE
  Engineered IL-6 binding polypeptide
VDAKYAKEEQAAWFEIHALPNLTVSQMAAFISKLFDDPSQSSELLSEAKKLNDSQAPK

SEQ ID NO: 537 - protein, 58 aa, ARTIFICIAL SEQUENCE
  Engineered IL-6 binding polypeptide
VDAKYAKEEAHAWYEIHILPNLTVRQIAAFIQKLFDDPSQSSELLSEAKKLNDSQAPK

SEQ ID NO: 538 - protein, 58 aa, ARTIFICIAL SEQUENCE
  Engineered IL-6 binding polypeptide
VDAKYAKEEAKAWWEIHSLPNLTAEQVSAFIQKLFDDPSQSSELLSEAKKLNDSQAPK

SEQ ID NO: 539 - protein, 58 aa, ARTIFICIAL SEQUENCE
  Engineered IL-6 binding polypeptide
VDAKYAKEEQKAWHEIHILPNLTTHQRVAFISKLFDDPSQSSELLSEAKKLNDSQAPK

SEQ ID NO: 540 - protein, 58 aa, ARTIFICIAL SEQUENCE
  Engineered IL-6 binding polypeptide
VDAKYAKEERQAWYEIHALPNLTVTQMAAFISKLFDDPSQSSELLSEAKKLNDSQAPK

SEQ ID NO: 541 - protein, 58 aa, ARTIFICIAL SEQUENCE
  Engineered IL-6 binding polypeptide
VDAKYAKEERDAWYEIHILPNLTVSQMSAFIQKLFDDPSQSSELLSEAKKLNDSQAPK

SEQ ID NO: 542 - protein, 58 aa, ARTIFICIAL SEQUENCE
  Engineered IL-6 binding polypeptide
VDAKYAKEEHDAWYEIHLLPNLTVQQMAAFISKLFDDPSQSSELLSEAKKLNDSQAPK

SEQ ID NO: 543 - protein, 58 aa, ARTIFICIAL SEQUENCE
  Engineered IL-6 binding polypeptide
VDAKYAKEEAHAWREIHLLPNLTVHQRTAFISKLFDDPSQSSELLSEAKKLNDSQAPK

SEQ ID NO: 544 - protein, 58 aa, ARTIFICIAL SEQUENCE
  Engineered IL-6 binding polypeptide
VDAKYAKEERHAWREIHLLPNLTHTQMAAFISKLFDDPSQSSELLSEAKKLNDSQAPK

SEQ ID NO: 545 - protein, 58 aa, ARTIFICIAL SEQUENCE
  Engineered IL-6 binding polypeptide
VDAKYAKEERHAWYEIHVLPNLTIQQMAAFIQKLFDDPSQSSELLSEAKKLNDSQAPK

SEQ ID NO: 546 - protein, 58 aa, ARTIFICIAL SEQUENCE
  Engineered IL-6 binding polypeptide
VDAKYAKEERKAWYEIHILPNLTTNQMAAFISKLFDDPSQSSELLSEAKKLNDSQAPK

SEQ ID NO: 547 - protein, 58 aa, ARTIFICIAL SEQUENCE
  Engineered IL-6 binding polypeptide
VDAKYAKEERDAWREIHLLPNLTVRQLSAFISKLFDDPSQSSELLSEAKKLNDSQAPK

SEQ ID NO: 548 - protein, 58 aa, ARTIFICIAL SEQUENCE
  Engineered IL-6 binding polypeptide
VDAKYAKEERQAWYEIHLLPNLTTQQMAAFIQKLFDDPSQSSELLSEAKKLNDSQAPK

SEQ ID NO: 549 - protein, 58 aa, ARTIFICIAL SEQUENCE
  Engineered IL-6 binding polypeptide
VDAKYAKEERKAWREIHTLPNLTVQQMAAFISKLFDDPSQSSELLSEAKKLNDSQAPK

SEQ ID NO: 550 - protein, 58 aa, ARTIFICIAL SEQUENCE
  Engineered IL-6 binding polypeptide
VDAKYAKEERHAWLEIHKLPNLTATQMAAFISKLFDDPSQSSELLSEAKKLNDSQAPK

SEQ ID NO: 551 - protein, 58 aa, ARTIFICIAL SEQUENCE
  Engineered IL-6 binding polypeptide
VDAKYAKEEREAWYEIHVLPNLTVEQMVAFIIKLYDDPSQSSELLSEAKKLNDSQAPK

SEQ ID NO: 552 - protein, 58 aa, ARTIFICIAL SEQUENCE
  Engineered IL-6 binding polypeptide
VDAKYAKEERQAWFEIHTLPNLTVDQMVAFISKLFDDPSQSSELLSEAKKLNDSQAPK

SEQ ID NO: 553 - protein, 58 aa, ARTIFICIAL SEQUENCE
  Engineered IL-6 binding polypeptide
VDAKYAKEEARAWYEIHSLPNLTVDQMSAFIIKLYDDPSQSSELLSEAKKLNDSQAPK

SEQ ID NO: 554 - protein, 58 aa, ARTIFICIAL SEQUENCE
  Engineered IL-6 binding polypeptide
VDAKYAKEEAHAWWEIHLLPNLTVHQIAAFISKLFDDPSQSSELLSEAKKLNDSQAPK

SEQ ID NO: 555 - protein, 58 aa, ARTIFICIAL SEQUENCE
  Engineered IL-6 binding polypeptide
VDAKYAKEEAQAWHEIHILPNLTIQQIAAFISKLFDDPSQSSELLSEAKKLNDSQAPK

SEQ ID NO: 556 - protein, 58 aa, ARTIFICIAL SEQUENCE
  Engineered IL-6 binding polypeptide
VDAKYAKEEQDAWWEIHKLPNLTVNQMAAFISKLYDDPSQSSELLSEAKKLNDSQAPK

SEQ ID NO: 557 - protein, 58 aa, ARTIFICIAL SEQUENCE
  Engineered IL-6 binding polypeptide
VDAKYAKEERAAWHEIHLLPNLTISQMAAFISKLFDDPSQSSELLSEAKKLNDSQAPK

SEQ ID NO: 558 - protein, 58 aa, ARTIFICIAL SEQUENCE
  Engineered IL-6 binding polypeptide
VDAKYAKEERQAWFEIHVLPNLTIHQIAAFISKLFDDPSQSSELLSEAKKLNDSQAPK

SEQ ID NO: 559 - protein, 58 aa, ARTIFICIAL SEQUENCE
  Engineered IL-6 binding polypeptide
VDAKYAKEEREAWWEIHALPNLTANQMAAFISKLFDDPSQSSELLSEAKKLNDSQAPK

SEQ ID NO: 560 - protein, 58 aa, ARTIFICIAL SEQUENCE
  Engineered IL-6 binding polypeptide
VDAKYAKEEATAWHEIHLLPNLTITQMAAFISKLFDDPSQSSELLSEAKKLNDSQAPK

SEQ ID NO: 561 - protein, 58 aa, ARTIFICIAL SEQUENCE
  Engineered IL-6 binding polypeptide
VDAKYAKEERKAWYEIHLLPNLTISQMTAFISKLFDDPSQSSELLSEAKKLNDSQAPK

SEQ ID NO: 562 - protein, 58 aa, ARTIFICIAL SEQUENCE
  Engineered IL-6 binding polypeptide
VDAKYAKEEAKAWFEIHALPNLTIQQMAAFISKLFDDPSQSSELLSEAKKLNDSQAPK

SEQ ID NO: 563 - protein, 58 aa, ARTIFICIAL SEQUENCE
  Engineered IL-6 binding polypeptide
VDAKYAKEEARAWHEIHILPNLTTQQMAAFISKLFDDPSQSSELLSEAKKLNDSQAPK

SEQ ID NO: 564 - protein, 58 aa, ARTIFICIAL SEQUENCE
  Engineered IL-6 binding polypeptide
VDAKYAKEEAQAWYEIHLLPNLTVSQIAAFIVKLYDDPSQSSELLSEAKKLNDSQAPK

SEQ ID NO: 565 - protein, 58 aa, ARTIFICIAL SEQUENCE
  Engineered IL-6 binding polypeptide
VDAKYAKEERHAWFEIHKLPNLTVDQVSAFIIKLYDDPSQSSELLSEAKKLNDSQAPK

SEQ ID NO: 566 - protein, 58 aa, ARTIFICIAL SEQUENCE
  Engineered IL-6 binding polypeptide
VDAKYAKEERQAWYEIHVLPNLTVSQMTAFISKLFDDPSQSSELLSEAKKLNDSQAPK

SEQ ID NO: 567 - protein, 58 aa, ARTIFICIAL SEQUENCE
  Engineered IL-6 binding polypeptide
VDAKYAKEEADAWHEIHLLPNLTIDQMAAFISKLFDDPSQSSELLSEAKKLNDSQAPK

SEQ ID NO: 568 - protein, 58 aa, ARTIFICIAL SEQUENCE
  Engineered IL-6 binding polypeptide
VDAKYAKEEASAWREIHILPNLTVNQMAAFISKLFDDPSQSSELLSEAKKLNDSQAPK

SEQ ID NO: 569 - protein, 58 aa, ARTIFICIAL SEQUENCE
  Engineered IL-6 binding polypeptide
VDAKYAKEEAQAWYEIHILPNLTVDQMAAFISKLFDDPSQSSELLSEAKKLNDSQAPK

SEQ ID NO: 570 - protein, 58 aa, ARTIFICIAL SEQUENCE
  Engineered IL-6 binding polypeptide
VDAKYAKEERSAWYEIHILPNLTVHQMTAFISKLFDDPSQSSELLSEAKKLNDSQAPK

SEQ ID NO: 571 - protein, 58 aa, ARTIFICIAL SEQUENCE
  Engineered IL-6 binding polypeptide
VDAKYAKEEATAWREIHLLPNLTVEQMAAFISKLFDDPSQSSELLSEAKKLNDSQAPK

SEQ ID NO: 572 - protein, 58 aa, ARTIFICIAL SEQUENCE
  Engineered IL-6 binding polypeptide
VDAKYAKEERTAWYEIHILPNLTVEQMTAFIQKLFDDPSQSSELLSEAKKLNDSQAPK

SEQ ID NO: 573 - protein, 58 aa, ARTIFICIAL SEQUENCE
  Engineered IL-6 binding polypeptide
VDAKYAKEEAHAWHEIHILPNLTVDQVVAFISKLFDDPSQSSELLSEAKKLNDSQAPK

SEQ ID NO: 574 - protein, 58 aa, ARTIFICIAL SEQUENCE
  Engineered IL-6 binding polypeptide
VDAKYAKEERRAWYEIHLLPNLTVEQMAAFISKLFDDPSQSSELLSEAKKLNDSQAPK

SEQ ID NO: 575 - protein, 58 aa, ARTIFICIAL SEQUENCE
  Engineered IL-6 binding polypeptide
VDAKYAKEERKAWYEIHLLPNLTVSQMTAFISKLFDDPSQSSELLSEAKKLNDSQAPK

SEQ ID NO: 576 - protein, 58 aa, ARTIFICIAL SEQUENCE
  Engineered IL-6 binding polypeptide
VDAKYAKEERRAWFEIHSLPNLTVRQIAAFIIKLFDDPSQSSELLSEAKKLNDSQAPK

SEQ ID NO: 577 - protein, 58 aa, ARTIFICIAL SEQUENCE
  Engineered IL-6 binding polypeptide
VDAKYAKEERQAWTEIHVLPNLTVNQMAAFISKLFDDPSQSSELLSEAKKLNDSQAPK

SEQ ID NO: 578 - protein, 58 aa, ARTIFICIAL SEQUENCE
  Engineered IL-6 binding polypeptide
VDAKYAKEEAHAWYEIHILPNLTIQQMAAFISKLFDDPSQSSELLSEAKKLNDSQAPK

SEQ ID NO: 579 - protein, 58 aa, ARTIFICIAL SEQUENCE
  Engineered IL-6 binding polypeptide
VDAKYAKEERSAWYEIHLLPNLTVDQMTAFIQKLFDDPSQSSELLSEAKKLNDSQAPK

SEQ ID NO: 580 - protein, 58 aa, ARTIFICIAL SEQUENCE
  Engineered IL-6 binding polypeptide
VDAKYAKEERRAWWEIHTLPNLTVDQMVAFISKLFDDPSQSSELLSEAKKLNDSQAPK

SEQ ID NO: 581 - protein, 58 aa, ARTIFICIAL SEQUENCE
  Engineered IL-6 binding polypeptide
VDAKYAKEERAAWFEIHMLPNLTVEQMAAFISKLFDDPSQSSELLSEAKKLNDSQAPK

SEQ ID NO: 582 - protein, 58 aa, ARTIFICIAL SEQUENCE
  Engineered IL-6 binding polypeptide
VDAKYAKEERTAWYEIHALPNLTVDQMVAFISKLFDDPSQSSELLSEAKKLNDSQAPK

SEQ ID NO: 583 - protein, 58 aa, ARTIFICIAL SEQUENCE
  Engineered IL-6 binding polypeptide
VDAKYAKEERQAWWEIHALPNLTVSQMAAFISKLFDDPSQSSELLSEAKKLNDSQAPK

SEQ ID NO: 584 - protein, 58 aa, ARTIFICIAL SEQUENCE
  Engineered IL-6 binding polypeptide
VDAKYAKEERAAWYEIHLLPNLTVEQMAAFISKLFDDPSQSSELLSEAKKLNDSQAPK

SEQ ID NO: 585 - protein, 58 aa, ARTIFICIAL SEQUENCE
  Engineered IL-6 binding polypeptide
VDAKYAKEEQQAWWEIHALPNLTIDQMTAFISKLFDDPSQSSELLSEAKKLNDSQAPK

SEQ ID NO: 586 - protein, 58 aa, ARTIFICIAL SEQUENCE
  Engineered IL-6 binding polypeptide
VDAKYAKEERRAWFEIHSLPNLTVRQMAAFISKLFDDPSQSSELLSEAKKLNDSQAPK

SEQ ID NO: 587 - protein, 58 aa, ARTIFICIAL SEQUENCE
  Engineered IL-6 binding polypeptide
VDAKYAKEERHAWWEIHKLPNLTVDQMAAFISKLFDDPSQSSELLSEAKKLNDSQAPK

SEQ ID NO: 588 - protein, 58 aa, ARTIFICIAL SEQUENCE
  Engineered IL-6 binding polypeptide
VDAKYAKEERKAWWEIHLLPNLTVTQIAAFISKLFDDPSQSSELLSEAKKLNDSQAPK

SEQ ID NO: 589 - protein, 58 aa, ARTIFICIAL SEQUENCE
  Engineered IL-6 binding polypeptide
VDAKYAKEERRAWFEIHSLPNLTVHQMAAFISKLFDDPSQSSELLSEAKKLNDSQAPK

SEQ ID NO: 590 - protein, 58 aa, ARTIFICIAL SEQUENCE
  Engineered IL-6 binding polypeptide
VDAKYAKEEAAAWWEIHMLPNLTVSQMAAFISKLFDDPSQSSELLSEAKKLNDSQAPK

SEQ ID NO: 591 - protein, 58 aa, ARTIFICIAL SEQUENCE
  Engineered IL-6 binding polypeptide
VDAKYAKEEAKAWHEIHLLPNLTVHQMAAFIIKLFDDPSQSSELLSEAKKLNDSQAPK

SEQ ID NO: 592 - protein, 58 aa, ARTIFICIAL SEQUENCE
  Engineered IL-6 binding polypeptide
VDAKYAKEERKAWTEIHLLPNLTVEQMAAFISKLFDDPSQSSELLSEAKKLNDSQAPK

SEQ ID NO: 593 - protein, 58 aa, ARTIFICIAL SEQUENCE
  Engineered IL-6 binding polypeptide
VDAKYAKEEREAWFEIHVLPNLTIRQMAAFISKLFDDPSQSSELLSEAKKLNDSQAPK

SEQ ID NO: 594 - protein, 58 aa, ARTIFICIAL SEQUENCE
  Engineered IL-6 binding polypeptide
VDAKYAKEEREAWYEIHALPNLTVQQMSAFISKLFDDPSQSSELLSEAKKLNDSQAPK

SEQ ID NO: 595 - protein, 58 aa, ARTIFICIAL SEQUENCE
  Engineered IL-6 binding polypeptide
VDAKYAKEERQAWFEIHTLPNLTANQMAAFIIKLYDDPSQSSELLSEAKKLNDSQAPK

SEQ ID NO: 596 - protein, 58 aa, ARTIFICIAL SEQUENCE
  Engineered IL-6 binding polypeptide
VDAKYAKEERHAWYEIHTLPNLTVQQMAAFISKLFDDPSQSSELLSEAKKLNDSQAPK

SEQ ID NO: 597 - protein, 58 aa, ARTIFICIAL SEQUENCE
  Engineered IL-6 binding polypeptide
VDAKYAKEERRAWYEIHLLPNLTVNQMVAFISKLFDDPSQSSELLSEAKKLNDSQAPK

SEQ ID NO: 598 - protein, 58 aa, ARTIFICIAL SEQUENCE
  Engineered IL-6 binding polypeptide
VDAKYAKEERHAWYEIHLLPNLTVEQMAAFISKLFDDPSQSSELLSEAKKLNDSQAPK

SEQ ID NO: 599 - protein, 58 aa, ARTIFICIAL SEQUENCE
  Engineered IL-6 binding polypeptide
VDAKYAKEERKAWYEIHLLPNLTVHQMAAFISKLFDDPSQSSELLSEAKKLNDSQAPK

SEQ ID NO: 600 - protein, 58 aa, ARTIFICIAL SEQUENCE
  Engineered IL-6 binding polypeptide
VDAKYAKEERSAWWEIHTLPNLTVDQMVAFISKLFDDPSQSSELLSEAKKLNDSQAPK

SEQ ID NO: 601 - protein, 58 aa, ARTIFICIAL SEQUENCE
  Engineered IL-6 binding polypeptide
VDAKYAKEEARAWFEIHTLPNLTVDQMAAFISKLFDDPSQSSELLSEAKKLNDSQAPK

SEQ ID NO: 602 - protein, 58 aa, ARTIFICIAL SEQUENCE
  Engineered IL-6 binding polypeptide
VDAKYAKEERRAWYEIHSLPNLTVTQMVAFISKLFDDPSQSSELLSEAKKLNDSQAPK

SEQ ID NO: 603 - protein, 58 aa, ARTIFICIAL SEQUENCE
  Engineered IL-6 binding polypeptide
VDAKYAKEEARAWHEIHVLPNLTVEQMTAFIIKLFDDPSQSSELLSEAKKLNDSQAPK

SEQ ID NO: 604 - protein, 58 aa, ARTIFICIAL SEQUENCE
  Engineered IL-6 binding polypeptide
VDAKYAKEERDAWYEIHLLPNLTIDQMAAFIQKLFDDPSQSSELLSEAKKLNDSQAPK

SEQ ID NO: 605 - protein, 58 aa, ARTIFICIAL SEQUENCE
  Engineered IL-6 binding polypeptide
VDAKYAKEEREAWWEIHLLPNLTIRQMAAFISKLFDDPSQSSELLSEAKKLNDSQAPK

SEQ ID NO: 606 - protein, 58 aa, ARTIFICIAL SEQUENCE
  Engineered IL-6 binding polypeptide
VDAKYAKEEQQAWYEIHLLPNLTVEQMAAFISKLFDDPSQSSELLSEAKKLNDSQAPK

SEQ ID NO: 607 - protein, 58 aa, ARTIFICIAL SEQUENCE
  Engineered IL-6 binding polypeptide
VDAKYAKEERDAWWEIHALPNLTVNQMAAFISKLFDDPSQSSELLSEAKKLNDSQAPK

SEQ ID NO: 608 - protein, 58 aa, ARTIFICIAL SEQUENCE
  Engineered IL-6 binding polypeptide
VDAKYAKEEARAWYEIHILPNLTVTQMAAFIQKLFDDPSQSSELLSEAKKLNDSQAPK

SEQ ID NO: 609 - protein, 58 aa, ARTIFICIAL SEQUENCE
  Engineered IL-6 binding polypeptide
VDAKYAKEERVAWYEIHMLPNLTVSQMAAFISKLFDDPSQSSELLSEAKKLNDSQAPK

SEQ ID NO: 610 - protein, 58 aa, ARTIFICIAL SEQUENCE
  Engineered IL-6 binding polypeptide
VDAKYAKEERTAWWEIHALPNLTVQQRSAFISKLFDDPSQSSELLSEAKKLNDSQAPK

SEQ ID NO: 611 - protein, 58 aa, ARTIFICIAL SEQUENCE
  Engineered IL-6 binding polypeptide
VDAKYAKEEAKAWYEIHLLPNLTVRQMAAFISKLFDDPSQSSELLSEAKKLNDSQAPK

SEQ ID NO: 612 - protein, 58 aa, ARTIFICIAL SEQUENCE
  Engineered IL-6 binding polypeptide
VDAKYAKEERKAWYEIHLLPNLTVRQMAAFIWKLLDDPSQSSELLSEAKKLNDSQAPK

SEQ ID NO: 613 - protein, 58 aa, ARTIFICIAL SEQUENCE
  Engineered IL-6 binding polypeptide
VDAKYAKEERQAWYEIHTLPNLTIDQMSAFISKLFDDPSQSSELLSEAKKLNDSQAPK

SEQ ID NO: 614 - protein, 58 aa, ARTIFICIAL SEQUENCE
  Engineered IL-6 binding polypeptide
VDAKYAKEERKAWWEIHKLPNLTVTQMAAFISKLFDDPSQSSELLSEAKKLNDSQAPK

SEQ ID NO: 615 - protein, 58 aa, ARTIFICIAL SEQUENCE
  Engineered IL-6 binding polypeptide
VDAKYAKEERKAWYEIHALPNLTVEQMAAFIQKLFDDPSQSSELLSEAKKLNDSQAPK

SEQ ID NO: 616 - protein, 58 aa, ARTIFICIAL SEQUENCE
  Engineered IL-6 binding polypeptide
VDAKYAKEEAHAWREIHLLPNLTVQQIAAFISKLFDDPSQSSELLSEAKKLNDSQAPK

SEQ ID NO: 617 - protein, 58 aa, ARTIFICIAL SEQUENCE
  Engineered IL-6 binding polypeptide
VDAKYAKEERHAWHEIHILPNLTVQQMAAFISKLFDDPSQSSELLSEAKKLNDSQAPK

SEQ ID NO: 618 - protein, 58 aa, ARTIFICIAL SEQUENCE
  Engineered IL-6 binding polypeptide
VDAKYAKEERDAWFEIHALPNLTANQMAAFISKLFDDPSQSSELLSEAKKLNDSQAPK

SEQ ID NO: 619 - protein, 58 aa, ARTIFICIAL SEQUENCE
  Engineered IL-6 binding polypeptide
VDAKYAKEEAKAWYEIHLLPNLTVNQMAAFISKLFDDPSQSSELLSEAKKLNDSQAPK

SEQ ID NO: 620 - protein, 58 aa, ARTIFICIAL SEQUENCE
  Engineered IL-6 binding polypeptide
VDAKYAKEERDAWFEIHSLPNLTVSQMAAFIIKLFDDPSQSSELLSEAKKLNDSQAPK

SEQ ID NO: 621 - protein, 58 aa, ARTIFICIAL SEQUENCE
  Engineered IL-6 binding polypeptide
VDAKYAKEERKAWWEIHVLPNLTVDQMAAFISKLFDDPSQSSELLSEAKKLNDSQAPK

SEQ ID NO: 622 - protein, 58 aa, ARTIFICIAL SEQUENCE
  Engineered IL-6 binding polypeptide
VDAKYAKEEAHAWYEIHTLPNLTVRQMAAFISKLFDDPSQSSELLSEAKKLNDSQAPK

SEQ ID NO: 623 - protein, 58 aa, ARTIFICIAL SEQUENCE
  Engineered IL-6 binding polypeptide
VDAKYAKEEARAWREIHTLPNLTVNQMAAFISKLFDDPSQSSELLSEAKKLNDSQAPK

SEQ ID NO: 624 - protein, 58 aa, ARTIFICIAL SEQUENCE
  Engineered IL-6 binding polypeptide
VDAKYAKEERRAWTEIHLLPNLTVEQMAAFISKLFDDPSQSSELLSEAKKLNDSQAPK

SEQ ID NO: 625 - protein, 58 aa, ARTIFICIAL SEQUENCE
  Engineered IL-6 binding polypeptide
VDAKYAKEEAHAWHEIHTLPNLTIDQMVAFISKLFDDPSQSSELLSEAKKLNDSQAPK

SEQ ID NO: 626 - protein, 58 aa, ARTIFICIAL SEQUENCE
  Engineered IL-6 binding polypeptide
VDAKYAKEERQAWYEIHLLPNLTVHQMAAFISKLFDDPSQSSELLSEAKKLNDSQAPK

SEQ ID NO: 627 - protein, 58 aa, ARTIFICIAL SEQUENCE
  Engineered IL-6 binding polypeptide
VDAKYAKEERRAWWEIHLLPNLTVRQMAAFISKLFDDPSQSSELLSEAKKLNDSQAPK

SEQ ID NO: 628 - protein, 58 aa, ARTIFICIAL SEQUENCE
  Engineered IL-6 binding polypeptide
VDAKYAKEEAHAWTEIHKLPNLTVDQMTAFIIKLYDDPSQSSELLSEAKKLNDSQAPK

SEQ ID NO: 629 - protein, 58 aa, ARTIFICIAL SEQUENCE
  Engineered IL-6 binding polypeptide
VDAKYAKEEARAWREIHLLPNLTVTQMAAFISKLFDDPSQSSELLSEAKKLNDSQAPK

SEQ ID NO: 630 - protein, 58 aa, ARTIFICIAL SEQUENCE
  Engineered IL-6 binding polypeptide
VDAKYAKEERQAWWEIHSLPNLTIEQMVAFISKLFDDPSQSSELLSEAKKLNDSQAPK

SEQ ID NO: 631 - protein, 58 aa, ARTIFICIAL SEQUENCE
  Engineered IL-6 binding polypeptide
VDAKYAKEERDAWYEIHLLPNLTIQQMAAFIQKLFDDPSQSSELLSEAKKLNDSQAPK

SEQ ID NO: 632 - protein, 58 aa, ARTIFICIAL SEQUENCE
  Engineered IL-6 binding polypeptide
VDAKYAKEERTAWWEIHKLPNLTVTQMAAFISKLFDDPSQSSELLSEAKKLNDSQAPK

SEQ ID NO: 633 - protein, 58 aa, ARTIFICIAL SEQUENCE
  Engineered IL-6 binding polypeptide
VDAKYAKEERDAWYEIHILPNLTIEQMAAFISKLFDDPSQSSELLSEAKKLNDSQAPK

SEQ ID NO: 634 - protein, 58 aa, ARTIFICIAL SEQUENCE
  Engineered IL-6 binding polypeptide
VDAKYAKEEREAWWEIHSLPNLTAHQMAAFIIKLFDDPSQSSELLSEAKKLNDSQAPK

SEQ ID NO: 635 - protein, 58 aa, ARTIFICIAL SEQUENCE
  Engineered IL-6 binding polypeptide
VDAKYAKEERKAWYEIHSLPNLTVSQMSAFISKLFDDPSQSSELLSEAKKLNDSQAPK

SEQ ID NO: 636 - protein, 58 aa, ARTIFICIAL SEQUENCE
  Engineered IL-6 binding polypeptide
VDAKYAKEERHAWFEIHALPNLTVSQMVAFISKLFDDPSQSSELLSEAKKLNDSQAPK

SEQ ID NO: 637 - protein, 58 aa, ARTIFICIAL SEQUENCE
  Engineered IL-6 binding polypeptide
VDAKYAKEERHAWREIHLLPNLTTEQMSAFIQKLFDDPSQSSELLSEAKKLNDSQAPK

SEQ ID NO: 638 - protein, 58 aa, ARTIFICIAL SEQUENCE
  Engineered IL-6 binding polypeptide
VDAKYAKEEHRAWTEIHTLPNLTVDQMAAFIIKLFDDPSQSSELLSEAKKLNDSQAPK

SEQ ID NO: 639 - protein, 58 aa, ARTIFICIAL SEQUENCE
  Engineered IL-6 binding polypeptide
VDAKYAKEERDAWYEIHLLPNLTTQQRAAFIVKLFDDPSQSSELLSEAKKLNDSQAPK

SEQ ID NO: 640 - protein, 58 aa, ARTIFICIAL SEQUENCE
  Engineered IL-6 binding polypeptide
VDAKYAKEEAQAWWEIHALPNLTVSQMVAFIMKLFDDPSQSSELLSEAKKLNDSQAPK

SEQ ID NO: 641 - protein, 58 aa, ARTIFICIAL SEQUENCE
  Engineered IL-6 binding polypeptide
VDAKYAKEEREAWWEIHALPNLTVNQVVAFISKLFDDPSQSSELLSEAKKLNDSQAPK

SEQ ID NO: 642 - protein, 58 aa, ARTIFICIAL SEQUENCE
  Engineered IL-6 binding polypeptide
VDAKYAKEERQAWYEIHVLPNLTVNQMAAFISKLFDDPSQSSELLSEAKKLNDSQAPK

SEQ ID NO: 643 - protein, 58 aa, ARTIFICIAL SEQUENCE
  Engineered IL-6 binding polypeptide
VDAKYAKEERSAWYEIHLLPNLTVHQMTAFISKLFDDPSQSSELLSEAKKLNDSQAPK

SEQ ID NO: 644 - protein, 58 aa, ARTIFICIAL SEQUENCE
  Engineered IL-6 binding polypeptide
VDAKYAKEEAKAWYEIHILPNLTVHQIAAFIQKLFDDPSQSSELLSEAKKLNDSQAPK

SEQ ID NO: 645 - protein, 58 aa, ARTIFICIAL SEQUENCE
  Engineered IL-6 binding polypeptide
VDAKYAKEEQQAWLEIHTLPNLTVSQMAAFISKLFDDPSQSSELLSEAKKLNDSQAPK

SEQ ID NO: 646 - protein, 58 aa, ARTIFICIAL SEQUENCE
  Engineered IL-6 binding polypeptide
VDAKYAKEEAHAWREIHLLPNLTVTQMAAFISKLFDDPSQSSELLSEAKKLNDSQAPK

SEQ ID NO: 647 - protein, 58 aa, ARTIFICIAL SEQUENCE
  Engineered IL-6 binding polypeptide
VDAKYAKEERAAWFEIHLLPNLTIHQMAAFISKLFDDPSQSSELLSEAKKLNDSQAPK

SEQ ID NO: 648 - protein, 58 aa, ARTIFICIAL SEQUENCE
  Engineered IL-6 binding polypeptide
VDAKYAKEEQQAWYEIHILPNLTVSQMAAFISKLFDDPSQSSELLSEAKKLNDSQAPK

SEQ ID NO: 649 - protein, 58 aa, ARTIFICIAL SEQUENCE
  Engineered IL-6 binding polypeptide
VDAKYAKEERDAWYEIHTLPNLTINQMAAFISKLFDDPSQSSELLSEAKKLNDSQAPK

SEQ ID NO: 650 - protein, 58 aa, ARTIFICIAL SEQUENCE
  Engineered IL-6 binding polypeptide
VDAKYAKEEAHAWYEIHILPNLTVNQITAFISKLFDDPSQSSELLSEAKKLNDSQAPK

SEQ ID NO: 651 - protein, 58 aa, ARTIFICIAL SEQUENCE
  Engineered IL-6 binding polypeptide
VDAKYAKEERRAWWEIHALPNLTVSQMVAFISKLFDDPSQSSELLSEAKKLNDSQAPK

SEQ ID NO: 652 - protein, 58 aa, ARTIFICIAL SEQUENCE
  Engineered IL-6 binding polypeptide
VDAKYAKEEAQAWYEIHTLPNLTVHQMAAFISKLFDDPSQSSELLSEAKKLNDSQAPK

SEQ ID NO: 653 - protein, 58 aa, ARTIFICIAL SEQUENCE
  Engineered IL-6 binding polypeptide
VDAKYAKEERAAWFEIHKLPNLTVEQMTAFIHKLYDDPSQSSELLSEAKKLNDSQAPK

SEQ ID NO: 654 - protein, 58 aa, ARTIFICIAL SEQUENCE
  Engineered IL-6 binding polypeptide
VDAKYAKEEAHAWREIHLLPNLTITQMAAFIQKLFDDPSQSSELLSEAKKLNDSQAPK

SEQ ID NO: 655 - protein, 58 aa, ARTIFICIAL SEQUENCE
  Engineered IL-6 binding polypeptide
VDAKYAKEEARAWHEIHVLPNLTVTQVVAFISKLFDDPSQSSELLSEAKKLNDSQAPK

SEQ ID NO: 656 - protein, 58 aa, ARTIFICIAL SEQUENCE
  Engineered IL-6 binding polypeptide
VDAKYAKEEAKAWHEIHVLPNLTVSQIAAFISKLFDDPSQSSELLSEAKKLNDSQAPK

SEQ ID NO: 657 - protein, 58 aa, ARTIFICIAL SEQUENCE
  Engineered IL-6 binding polypeptide
VDAKYAKEEHRAWYEIHLLPNLTINQMAAFISKLFDDPSQSSELLSEAKKLNDSQAPK

SEQ ID NO: 658 - protein, 58 aa, ARTIFICIAL SEQUENCE
  Engineered IL-6 binding polypeptide
VDAKYAKEEAHAWTEIHKLPNLTTQQMAAFIQKLFDDPSQSSELLSEAKKLNDSQAPK

SEQ ID NO: 659 - protein, 58 aa, ARTIFICIAL SEQUENCE
  Engineered IL-6 binding polypeptide
VDAKYAKEERTAWYEIHLLPNLTVRQMVAFISKLFDDPSQSSELLSEAKKLNDSQAPK

SEQ ID NO: 660 - protein, 58 aa, ARTIFICIAL SEQUENCE
  Engineered IL-6 binding polypeptide
VDAKYAKEERKAWYEIHLLPNLTIQQIAAFISKLFDDPSQSSELLSEAKKLNDSQAPK

SEQ ID NO: 661 - protein, 58 aa, ARTIFICIAL SEQUENCE
  Engineered IL-6 binding polypeptide
VDAKYAKEEREAWHEIHLLPNLTVTQMAAFIIKLFDDPSQSSELLSEAKKLNDSQAPK

SEQ ID NO: 662 - protein, 58 aa, ARTIFICIAL SEQUENCE
  Engineered IL-6 binding polypeptide
VDAKYAKEEARAWWEIHLLPNLTVEQMAAFISKLFDDPSQSSELLSEAKKLNDSQAPK

SEQ ID NO: 663 - protein, 58 aa, ARTIFICIAL SEQUENCE
  Engineered IL-6 binding polypeptide
VDAKYAKEERQAWWEIHILPNLTVTQMAAFISKLFDDPSQSSELLSEAKKLNDSQAPK

SEQ ID NO: 664 - protein, 58 aa, ARTIFICIAL SEQUENCE
  Engineered IL-6 binding polypeptide
VDAKYAKEEAQAWREIHTLPNLTANQMAAFIIKLYDDPSQSSELLSEAKKLNDSQAPK

SEQ ID NO: 665 - protein, 58 aa, ARTIFICIAL SEQUENCE
  Engineered IL-6 binding polypeptide
VDAKYAKEERHAWTEIHLLPNLTISQMAAFISKLFDDPSQSSELLSEAKKLNDSQAPK

SEQ ID NO: 666 - protein, 58 aa, ARTIFICIAL SEQUENCE
  Engineered IL-6 binding polypeptide
VDAKYAKEEARAWWEIHMLPNLTVTQMAAFISKLFDDPSQSSELLSEAKKLNDSQAPK

SEQ ID NO: 667 - protein, 58 aa, ARTIFICIAL SEQUENCE
  Engineered IL-6 binding polypeptide
VDAKYAKEEREAWWEIHLLPNLTAEQMAAFISKLFDDPSQSSELLSEAKKLNDSQAPK

SEQ ID NO: 668 - protein, 58 aa, ARTIFICIAL SEQUENCE
  Engineered IL-6 binding polypeptide
VDAKYAKEEATAWWEIHLLPNLTVTQMAAFIQKLFDDPSQSSELLSEAKKLNDSQAPK

SEQ ID NO: 669 - protein, 58 aa, ARTIFICIAL SEQUENCE
  Engineered IL-6 binding polypeptide
VDAKYAKEEAKAWHEIHLLPNLTVNQMAAFISKLFDDPSQSSELLSEAKKLNDSQAPK

SEQ ID NO: 670 - protein, 58 aa, ARTIFICIAL SEQUENCE
  Engineered IL-6 binding polypeptide
VDAKYAKEERRAWYEIHLLPNLTITQMTAFISKLFDDPSQSSELLSEAKKLNDSQAPK

SEQ ID NO: 671 - protein, 58 aa, ARTIFICIAL SEQUENCE
  Engineered IL-6 binding polypeptide
VDAKYAKEERRAWYEIHLLPNLTVHQIAAFISKLFDDPSQSSELLSEAKKLNDSQAPK

SEQ ID NO: 672 - protein, 58 aa, ARTIFICIAL SEQUENCE
  Engineered IL-6 binding polypeptide
VDAKYAKEEHEAWWEIHLLPNLTVTQMAAFISKLFDDPSQSSELLSEAKKLNDSQAPK

SEQ ID NO: 673 - protein, 58 aa, ARTIFICIAL SEQUENCE
  Engineered IL-6 binding polypeptide
VDAKYAKEERKAWTEIHSLPNLTVDQMSAFIIKLFDDPSQSSELLSEAKKLNDSQAPK

SEQ ID NO: 674 - protein, 58 aa, ARTIFICIAL SEQUENCE
  Engineered IL-6 binding polypeptide
VDAKYAKEEAKAWFEIHLLPNLTINQMAAFISKLFDDPSQSSELLSEAKKLNDSQAPK

SEQ ID NO: 675 - protein, 58 aa, ARTIFICIAL SEQUENCE
  Engineered IL-6 binding polypeptide
VDAKYAKEERDAWYEIHVLPNLTIEQMSAFISKLFDDPSQSSELLSEAKKLNDSQAPK

SEQ ID NO: 676 - protein, 58 aa, ARTIFICIAL SEQUENCE
  Engineered IL-6 binding polypeptide
VDAKYAKEEAHAWWEIHALPNLTVTQMAAFISKLFDDPSQSSELLSEAKKLNDSQAPK

SEQ ID NO: 677 - protein, 58 aa, ARTIFICIAL SEQUENCE
  Engineered IL-6 binding polypeptide
VDAKYAKEEAKAWYEIHLLPNLTVTQMAAFISKLFDDPSQSSELLSEAKKLNDSQAPK

SEQ ID NO: 678 - protein, 58 aa, ARTIFICIAL SEQUENCE
  Engineered IL-6 binding polypeptide
VDAKYAKEERDAWWEIHKLPNLTVSQMAAFISKLFDDPSQSSELLSEAKKLNDSQAPK

SEQ ID NO: 679 - protein, 58 aa, ARTIFICIAL SEQUENCE
  Engineered IL-6 binding polypeptide
VDAKYAKEERDAWYEIHLLPNLTVRQMAAFISKLFDDPSQSSELLSEAKKLNDSQAPK

SEQ ID NO: 680 - protein, 58 aa, ARTIFICIAL SEQUENCE
  Engineered IL-6 binding polypeptide
VDAKYAKEERAAWWEIHLLPNLTVQQMAAFISKLFDDPSQSSELLSEAKKLNDSQAPK

SEQ ID NO: 681 - protein, 58 aa, ARTIFICIAL SEQUENCE
  Engineered IL-6 binding polypeptide
VDAKYAKEEQQAWYEIHLLPNLTVTQMAAFIIKLFDDPSQSSELLSEAKKLNDSQAPK

SEQ ID NO: 682 - protein, 58 aa, ARTIFICIAL SEQUENCE
  Engineered IL-6 binding polypeptide
VDAKYAKEEADAWFEIHILPNLTIDQMAAFIQKLFDDPSQSSELLSEAKKLNDSQAPK

SEQ ID NO: 683 - protein, 58 aa, ARTIFICIAL SEQUENCE
  Engineered IL-6 binding polypeptide
VDAKYAKEEREAWHEIHTLPNLTVDQMAAFISKLFDDPSQSSELLSEAKKLNDSQAPK

SEQ ID NO: 684 - protein, 58 aa, ARTIFICIAL SEQUENCE
  Engineered IL-6 binding polypeptide
VDAKYAKEEATAWFEIHTLPNLTVSQMAAFIWKLFDDPSQSSELLSEAKKLNDSQAPK

SEQ ID NO: 685 - protein, 58 aa, ARTIFICIAL SEQUENCE
  Engineered IL-6 binding polypeptide
VDAKYAKEEAAAWHEIHILPNLTHHQMAAFIQKLFDDPSQSSELLSEAKKLNDSQAPK

SEQ ID NO: 686 - protein, 58 aa, ARTIFICIAL SEQUENCE
  Engineered IL-6 binding polypeptide
VDAKYAKEERDAWFEIHALPNLTVNQMAAFIIKLYDDPSQSSELLSEAKKLNDSQAPK

SEQ ID NO: 687 - protein, 58 aa, ARTIFICIAL SEQUENCE
  Engineered IL-6 binding polypeptide
VDAKYAKEERKAWYEIHLLPNLTTSQHAAFISKLFDDPSQSSELLSEAKKLNDSQAPK

SEQ ID NO: 688 - protein, 58 aa, ARTIFICIAL SEQUENCE
  Engineered IL-6 binding polypeptide
VDAKYAKEERDAWYEIHLLPNLTVRQMSAFIIKLFDDPSQSSELLSEAKKLNDSQAPK

SEQ ID NO: 689 - protein, 58 aa, ARTIFICIAL SEQUENCE
  Engineered IL-6 binding polypeptide
VDAKYAKEEAVAWHEIHALPNLTVDQMSAFISKLFDDPSQSSELLSEAKKLNDSQAPK

SEQ ID NO: 690 - protein, 58 aa, ARTIFICIAL SEQUENCE
  Engineered IL-6 binding polypeptide
VDAKYAKEEAKAWFEIHALPNLTIEQMVAFISKLFDDPSQSSELLSEAKKLNDSQAPK

SEQ ID NO: 691 - protein, 58 aa, ARTIFICIAL SEQUENCE
  Engineered IL-6 binding polypeptide
VDAKYAKEEADAWHEIHILPNLTVQQMAAFIQKLFDDPSQSSELLSEAKKLNDSQAPK

SEQ ID NO: 692 - protein, 58 aa, ARTIFICIAL SEQUENCE
  Engineered IL-6 binding polypeptide
VDAKYAKEEAAAWWEIHSLPNLTVSQMAAFIWKLFDDPSQSSELLSEAKKLNDSQAPK

SEQ ID NO: 693 - protein, 58 aa, ARTIFICIAL SEQUENCE
  Engineered IL-6 binding polypeptide
VDAKYAKEEAKAWHEIHTLPNLTVDQMAAFISKLFDDPSQSSELLSEAKKLNDSQAPK

SEQ ID NO: 694 - protein, 58 aa, ARTIFICIAL SEQUENCE
  Engineered IL-6 binding polypeptide
VDAKYAKEEAQAWWEIHILPNLTVNQIAAFISKLFDDPSQSSELLSEAKKLNDSQAPK

SEQ ID NO: 695 - protein, 58 aa, ARTIFICIAL SEQUENCE
  Engineered IL-6 binding polypeptide
VDAKYAKEERSAWFEIHVLPNLTIRQMSAFISKLFDDPSQSSELLSEAKKLNDSQAPK

SEQ ID NO: 696 - protein, 58 aa, ARTIFICIAL SEQUENCE
  Engineered IL-6 binding polypeptide
VDAKYAKEERRAWLEIHLLPNLTVTQMTAFISKLFDDPSQSSELLSEAKKLNDSQAPK

SEQ ID NO: 697 - protein, 58 aa, ARTIFICIAL SEQUENCE
  Engineered IL-6 binding polypeptide
VDAKYAKEERAAWFEIHLLPNLTATQIAAFISKLFDDPSQSSELLSEAKKLNDSQAPK

SEQ ID NO: 698 - protein, 58 aa, ARTIFICIAL SEQUENCE
  Engineered IL-6 binding polypeptide
VDAKYAKEERAAWHEIHVLPNLTVDQMAAFISKLFDDPSQSSELLSEAKKLNDSQAPK

SEQ ID NO: 699 - protein, 58 aa, ARTIFICIAL SEQUENCE
  Engineered IL-6 binding polypeptide
VDAKYAKEEARAWYEIHTLPNLTIHQMAAFISKLFDDPSQSSELLSEAKKLNDSQAPK

SEQ ID NO: 700 - protein, 58 aa, ARTIFICIAL SEQUENCE
  Engineered IL-6 binding polypeptide
VDAKYAKEEAEAWFEIHALPNLTVHQMAAFIQKLFDDPSQSSELLSEAKKLNDSQAPK

SEQ ID NO: 701 - protein, 58 aa, ARTIFICIAL SEQUENCE
  Engineered IL-6 binding polypeptide
VDAKYAKEERAAWYEIHSLPNLTTNQMAAFISKLFDDPSQSSELLSEAKKLNDSQAPK

SEQ ID NO: 702 - protein, 58 aa, ARTIFICIAL SEQUENCE
  Engineered IL-6 binding polypeptide
VDAKYAKEEAKAWHEIHVLPNLTIEQRAAFISKLFDDPSQSSELLSEAKKLNDSQAPK

SEQ ID NO: 703 - protein, 58 aa, ARTIFICIAL SEQUENCE
  Engineered IL-6 binding polypeptide
VDAKYAKEERTAWYEIHVLPNLTATQMAAFISKLFDDPSQSSELLSEAKKLNDSQAPK

SEQ ID NO: 704 - protein, 58 aa, ARTIFICIAL SEQUENCE
  Engineered IL-6 binding polypeptide
VDAKYAKEERRAWWEIHLLPNLTVDQMSAFISKLFDDPSQSSELLSEAKKLNDSQAPK

SEQ ID NO: 705 - protein, 58 aa, ARTIFICIAL SEQUENCE
  Engineered IL-6 binding polypeptide
VDAKYAKEEADAWREIHLLPNLTVTQTAAFISKLFDDPSQSSELLSEAKKLNDSQAPK

SEQ ID NO: 706 - protein, 58 aa, ARTIFICIAL SEQUENCE
  Engineered IL-6 binding polypeptide
VDAKYAKEERDAWFEIHVLPNLTTEQMVAFISKLFDDPSQSSELLSEAKKLNDSQAPK

SEQ ID NO: 707 - protein, 58 aa, ARTIFICIAL SEQUENCE
  Engineered IL-6 binding polypeptide
VDAKYAKEEQQAWYEIHVLPNLTVSQMAAFISKLFDDPSQSSELLSEAKKLNDSQAPK

SEQ ID NO: 708 - protein, 58 aa, ARTIFICIAL SEQUENCE
  Engineered IL-6 binding polypeptide
VDAKYAKEERRAWFEIHALPNLTVNQMVAFISKLFDDPSQSSELLSEAKKLNDSQAPK

SEQ ID NO: 709 - protein, 58 aa, ARTIFICIAL SEQUENCE
  Engineered IL-6 binding polypeptide
VDAKYAKEERKAWFEIHSLPNLTATQMHAFISKLFDDPSQSSELLSEAKKLNDSQAPK

SEQ ID NO: 710 - protein, 58 aa, ARTIFICIAL SEQUENCE
  Engineered IL-6 binding polypeptide
VDAKYAKEEQQAWLEIHLLPNLTVEQMTAFIHKLYDDPSQSSELLSEAKKLNDSQAPK

SEQ ID NO: 711 - protein, 58 aa, ARTIFICIAL SEQUENCE
  Engineered IL-6 binding polypeptide
VDAKYAKEEAEAWLEIHLLPNLTVHQMAAFISKLFDDPSQSSELLSEAKKLNDSQAPK

SEQ ID NO: 712 - protein, 58 aa, ARTIFICIAL SEQUENCE
  Engineered IL-6 binding polypeptide
VDAKYAKEERDAWHEIHLLPNLTINQMTAFISKLFDDPSQSSELLSEAKKLNDSQAPK

SEQ ID NO: 713 - protein, 58 aa, ARTIFICIAL SEQUENCE
  Engineered IL-6 binding polypeptide
VDAKYAKEERRAWYEIHILPNLTVHQMTAFIQKLLDDPSQSSELLSEAKKLNDSQAPK

SEQ ID NO: 714 - protein, 58 aa, ARTIFICIAL SEQUENCE
  Engineered IL-6 binding polypeptide
VDAKYAKEEARAWHEIHLLPNLTVDQTTAFISKLFDDPSQSSELLSEAKKLNDSQAPK

SEQ ID NO: 715 - protein, 58 aa, ARTIFICIAL SEQUENCE
  Engineered IL-6 binding polypeptide
VDAKYAKEERQAWREIHTLPNLTVHQMAAFISKLFDDPSQSSELLSEAKKLNDSQAPK

SEQ ID NO: 716 - protein, 58 aa, ARTIFICIAL SEQUENCE
  Engineered IL-6 binding polypeptide
VDAKYAKEEHDAWREIHTLPNLTVSQMAAFISKLFDDPSQSSELLSEAKKLNDSQAPK

SEQ ID NO: 717 - protein, 58 aa, ARTIFICIAL SEQUENCE
  Engineered IL-6 binding polypeptide
VDAKYAKEERAAWWEIHTLPNLTVHQMAAFISKLFDDPSQSSELLSEAKKLNDSQAPK

SEQ ID NO: 718 - protein, 58 aa, ARTIFICIAL SEQUENCE
  Engineered IL-6 binding polypeptide
VDAKYAKEEAKAWHEIHALPNLTVSQMAAFISKLFDDPSQSSELLSEAKKLNDSQAPK

SEQ ID NO: 719 - protein, 58 aa, ARTIFICIAL SEQUENCE
  Engineered IL-6 binding polypeptide
VDAKYAKEEAAAWWEIHTLPNLTVDQMAAFISKLFDDPSQSSELLSEAKKLNDSQAPK

SEQ ID NO: 720 - protein, 58 aa, ARTIFICIAL SEQUENCE
  Engineered IL-6 binding polypeptide
VDAKYAKEERQAWFEIHKLPNLTVNQMAAFISKLFDDPSQSSELLSEAKKLNDSQAPK

SEQ ID NO: 721 - protein, 58 aa, ARTIFICIAL SEQUENCE
  Engineered IL-6 binding polypeptide
VDAKYAKEERSAWREIHVLPNLTVNQRAAFISKLFDDPSQSSELLSEAKKLNDSQAPK

SEQ ID NO: 722 - protein, 58 aa, ARTIFICIAL SEQUENCE
  Engineered IL-6 binding polypeptide
VDAKYAKEEAAAWHEIHLLPNLTVTQIAAFISKLFDDPSQSSELLSEAKKLNDSQAPK

SEQ ID NO: 723 - protein, 58 aa, ARTIFICIAL SEQUENCE
  Engineered IL-6 binding polypeptide
VDAKYAKEEREAWAEIHKLPNLTATQMHAFISKLFDDPSQSSELLSEAKKLNDSQAPK

SEQ ID NO: 724 - protein, 58 aa, ARTIFICIAL SEQUENCE
  Engineered IL-6 binding polypeptide
VDAKYAKEEQRAWSEIHSLPNLTVNQMAAFIMKLYDDPSQSSELLSEAKKLNDSQAPK

SEQ ID NO: 725 - protein, 58 aa, ARTIFICIAL SEQUENCE
  Engineered IL-6 binding polypeptide
VDAKYAKEEAKAWWEIHVLPNLTIDQITAFIHKLYDDPSQSSELLSEAKKLNDSQAPK

SEQ ID NO: 726 - protein, 58 aa, ARTIFICIAL SEQUENCE
  Engineered IL-6 binding polypeptide
VDAKYAKEEAQAWWEIHTLPNLTVDQMAAFISKLFDDPSQSSELLSEAKKLNDSQAPK

SEQ ID NO: 727 - protein, 58 aa, ARTIFICIAL SEQUENCE
  Engineered IL-6 binding polypeptide
VDAKYAKEERRAWHEIHILPNLTTSQMAAFIQKLFDDPSQSSELLSEAKKLNDSQAPK

SEQ ID NO: 728 - protein, 58 aa, ARTIFICIAL SEQUENCE
  Engineered IL-6 binding polypeptide
VDAKYAKEERSAWYEIHTLPNLTTNQRTAFISKLFDDPSQSSELLSEAKKLNDSQAPK

SEQ ID NO: 729 - protein, 58 aa, ARTIFICIAL SEQUENCE
  Engineered IL-6 binding polypeptide
VDAKYAKEERRAWFEIHMLPNLTIDQMAAFISKLFDDPSQSSELLSEAKKLNDSQAPK

SEQ ID NO: 730 - protein, 58 aa, ARTIFICIAL SEQUENCE
  Engineered IL-6 binding polypeptide
VDAKYAKEEAKAWYEIHALPNLTVDQMVAFITKLFDDPSQSSELLSEAKKLNDSQAPK

SEQ ID NO: 731 - protein, 58 aa, ARTIFICIAL SEQUENCE
  Engineered IL-6 binding polypeptide
VDAKYAKEEHVAWLEIHLLPNLTAEQMAAFISKLYDDPSQSSELLSEAKKLNDSQAPK

SEQ ID NO: 732 - protein, 58 aa, ARTIFICIAL SEQUENCE
  Engineered IL-6 binding polypeptide
VDAKYAKEERDAWFEIHALPNLTVQQMAAFISKLFDDPSQSSELLSEAKKLNDSQAPK

SEQ ID NO: 733 - protein, 58 aa, ARTIFICIAL SEQUENCE
  Engineered IL-6 binding polypeptide
VDAKYAKEEARAWREIHLLPNLTVDQMAAFISKLFDDPSQSSELLSEAKKLNDSQAPK

SEQ ID NO: 734 - protein, 58 aa, ARTIFICIAL SEQUENCE
  Engineered IL-6 binding polypeptide
VDAKYAKEEARAWWEIHMLPNLTINQMAAFISKLFDDPSQSSELLSEAKKLNDSQAPK

SEQ ID NO: 735 - protein, 58 aa, ARTIFICIAL SEQUENCE
  Engineered IL-6 binding polypeptide
VDAKYAKEEAAAWLEIHKLPNLTVHQMAAFISKLFDDPSQSSELLSEAKKLNDSQAPK

SEQ ID NO: 736 - protein, 58 aa, ARTIFICIAL SEQUENCE
  Engineered IL-6 binding polypeptide
VDAKYAKEERQAWFEIHVLPNLTTDQMAAFIHKLYDDPSQSSELLSEAKKLNDSQAPK

SEQ ID NO: 737 - protein, 58 aa, ARTIFICIAL SEQUENCE
  Engineered IL-6 binding polypeptide
VDAKYAKEEQRAWTEIHLLPNLTVNQMAAFISKLFDDPSQSSELLSEAKKLNDSQAPK

SEQ ID NO: 738 - protein, 58 aa, ARTIFICIAL SEQUENCE
  Engineered IL-6 binding polypeptide
VDAKYAKEEQQAWYEIHTLPNLTVQQMAAFIQKLFDDPSQSSELLSEAKKLNDSQAPK

SEQ ID NO: 739 - protein, 58 aa, ARTIFICIAL SEQUENCE
  Engineered IL-6 binding polypeptide
VDAKYAKEEQHAWREIHILPNLTVTQIAAFISKLFDDPSQSSELLSEAKKLNDSQAPK

SEQ ID NO: 740 - protein, 58 aa, ARTIFICIAL SEQUENCE
  Engineered IL-6 binding polypeptide
VDAKYAKEEQRAWYEIHLLPNLTVTQMAAFISKLFDDPSQSSELLSEAKKLNDSQAPK

SEQ ID NO: 741 - protein, 58 aa, ARTIFICIAL SEQUENCE
  Engineered IL-6 binding polypeptide
VDAKYAKEERAAWFEIHSLPNLTVSQMAAFISKLFDDPSQSSELLSEAKKLNDSQAPK

SEQ ID NO: 742 - protein, 58 aa, ARTIFICIAL SEQUENCE
  Engineered IL-6 binding polypeptide
VDAKYAKEERQAWYEIHILPNLTAEQMAAFISKLFDDPSQSSELLSEAKKLNDSQAPK

SEQ ID NO: 743 - protein, 58 aa, ARTIFICIAL SEQUENCE
  Engineered IL-6 binding polypeptide
VDAKYAKEEAQAWWEIHVLPNLTVRQIVAFISKLFDDPSQSSELLSEAKKLNDSQAPK

SEQ ID NO: 744 - protein, 58 aa, ARTIFICIAL SEQUENCE
  Engineered IL-6 binding polypeptide
VDAKYAKEERRAWFEIHTLPNLTVHQMTAFIQKLFDDPSQSSELLSEAKKLNDSQAPK

SEQ ID NO: 745 - protein, 58 aa, ARTIFICIAL SEQUENCE
  Engineered IL-6 binding polypeptide
VDAKYAKEEQRAWHEIHLLPNLTTRQMAAFISKLFDDPSQSSELLSEAKKLNDSQAPK

SEQ ID NO: 746 - protein, 58 aa, ARTIFICIAL SEQUENCE
  Engineered IL-6 binding polypeptide
VDAKYAKEERHAWHEIHILPNLTIEQMVAFISKLFDDPSQSSELLSEAKKLNDSQAPK

SEQ ID NO: 747 - protein, 58 aa, ARTIFICIAL SEQUENCE
  Engineered IL-6 binding polypeptide
VDAKYAKEERQAWFEIHALPNLTVQQVEAFISKLFDDPSQSSELLSEAKKLNDSQAPK

SEQ ID NO: 748 - protein, 58 aa, ARTIFICIAL SEQUENCE
  Engineered IL-6 binding polypeptide
VDAKYAKEEQRAWREIHLLPNLTVTQMAAFISKLFDDPSQSSELLSEAKKLNDSQAPK

SEQ ID NO: 749 - protein, 58 aa, ARTIFICIAL SEQUENCE
  Engineered IL-6 binding polypeptide
VDAKYAKEERHAWWEIHSLPNLTISQMAAFISKLFDDPSQSSELLSEAKKLNDSQAPK

SEQ ID NO: 750 - protein, 58 aa, ARTIFICIAL SEQUENCE
  Engineered IL-6 binding polypeptide
VDAKYAKEEARAWLEIHALPNLTVDQMAAFISKLFDDPSQSSELLSEAKKLNDSQAPK

SEQ ID NO: 751 - protein, 58 aa, ARTIFICIAL SEQUENCE
  Engineered IL-6 binding polypeptide
VDAKYAKEEQRAWHEIHTLPNLTVRQMAAFIIKLFDDPSQSSELLSEAKKLNDSQAPK

SEQ ID NO: 752 - protein, 58 aa, ARTIFICIAL SEQUENCE
  Engineered IL-6 binding polypeptide
VDAKYAKEERHAWFEIHKLPNLTVEQMAAFIWKLFDDPSQSSELLSEAKKLNDSQAPK

SEQ ID NO: 753 - protein, 58 aa, ARTIFICIAL SEQUENCE
  Engineered IL-6 binding polypeptide
VDAKYAKEERDAWYEIHLLPNLTINQIAAFISKLFDDPSQSSELLSEAKKLNDSQAPK

SEQ ID NO: 754 - protein, 58 aa, ARTIFICIAL SEQUENCE
  Engineered IL-6 binding polypeptide
VDAKYAKEERQAWHEIHILPNLTVTQMTAFISKLFDDPSQSSELLSEAKKLNDSQAPK

SEQ ID NO: 755 - protein, 58 aa, ARTIFICIAL SEQUENCE
  Engineered IL-6 binding polypeptide
VDAKYAKEERQAWTEIHSLPNLTATQVAAFIQKLFDDPSQSSELLSEAKKLNDSQAPK

SEQ ID NO: 756 - protein, 58 aa, ARTIFICIAL SEQUENCE
  Engineered IL-6 binding polypeptide
VDAKYAKEEREAWWEIHHLPNLTVHQRAAFISKLFDDPSQSSELLSEAKKLNDSQAPK

SEQ ID NO: 757 - protein, 58 aa, ARTIFICIAL SEQUENCE
  Engineered IL-6 binding polypeptide
VDAKYAKEERAAWYEIHTLPNLTVSQMTAFISKLFDDPSQSSELLSEAKKLNDSQAPK

SEQ ID NO: 758 - protein, 58 aa, ARTIFICIAL SEQUENCE
  Engineered IL-6 binding polypeptide
VDAKYAKEEHQAWWEIHLLPNLTARQMEAFIQKLFDDPSQSSELLSEAKKLNDSQAPK

SEQ ID NO: 759 - protein, 58 aa, ARTIFICIAL SEQUENCE
  Engineered IL-6 binding polypeptide
VDAKYAKEEAHAWTEIHLLPNLTVDQMVAFISKLFDDPSQSSELLSEAKKLNDSQAPK

SEQ ID NO: 760 - protein, 58 aa, ARTIFICIAL SEQUENCE
  Engineered IL-6 binding polypeptide
VDAKYAKEERRAWHEIHLLPNLTIQQIAAFISKLFDDPSQSSELLSEAKKLNDSQAPK

SEQ ID NO: 761 - protein, 58 aa, ARTIFICIAL SEQUENCE
  Engineered IL-6 binding polypeptide
VDAKYAKEEHDAWFEIHTLPNLTVEQMAAFIMKLFDDPSQSSELLSEAKKLNDSQAPK

SEQ ID NO: 762 - protein, 58 aa, ARTIFICIAL SEQUENCE
  Engineered IL-6 binding polypeptide
VDAKYAKEEHRAWLEIHLLPNLTVRQMAAFISKLFDDPSQSSELLSEAKKLNDSQAPK

SEQ ID NO: 763 - protein, 58 aa, ARTIFICIAL SEQUENCE
  Engineered IL-6 binding polypeptide
VDAKYAKEEAKAWWEIHLLPNLTVDQMAAFISKLFDDPSQSSELLSEAKKLNDSQAPK

SEQ ID NO: 764 - protein, 58 aa, ARTIFICIAL SEQUENCE
  Engineered IL-6 binding polypeptide
VDAKYAKEERKAWHEIHVLPNLTTNQRVAFIMKLMDDPSQSSELLSEAKKLNDSQAPK

SEQ ID NO: 765 - protein, 58 aa, ARTIFICIAL SEQUENCE
  Engineered IL-6 binding polypeptide
VDAKYAKEERRAWWEIHILPNLTVEQAAAFISKLFDDPSQSSELLSEAKKLNDSQAPK

SEQ ID NO: 766 - protein, 58 aa, ARTIFICIAL SEQUENCE
  Engineered IL-6 binding polypeptide
VDAKYAKEEAAAWYEIHTLPNLTIDQMAAFISKLFDDPSQSSELLSEAKKLNDSQAPK

SEQ ID NO: 767 - protein, 58 aa, ARTIFICIAL SEQUENCE
  Engineered IL-6 binding polypeptide
VDAKYAKEERAAWFEIHKLPNLTVSQMAAFIQKLFDDPSQSSELLSEAKKLNDSQAPK

SEQ ID NO: 768 - protein, 58 aa, ARTIFICIAL SEQUENCE
  Engineered IL-6 binding polypeptide
VDAKYAKEEAEAWTEIHKLPNLTVHQMTAFIIKLFDDPSQSSELLSEAKKLNDSQAPK

SEQ ID NO: 769 - protein, 58 aa, ARTIFICIAL SEQUENCE
  Engineered IL-6 binding polypeptide
VDAKYAKEERHAWWEIHKLPNLTISQMAAFISKLFDDPSQSSELLSEAKKLNDSQAPK

SEQ ID NO: 770 - protein, 58 aa, ARTIFICIAL SEQUENCE
  Engineered IL-6 binding polypeptide
VDAKYAKEERKAWYEIHLLPNLTTSQRVAFISKLFDDPSQSSELLSEAKKLNDSQAPK

SEQ ID NO: 771 - protein, 58 aa, ARTIFICIAL SEQUENCE
  Engineered IL-6 binding polypeptide
VDAKYAKEEASAWWEIHVLPNLTVNQIAAFISKLFDDPSQSSELLSEAKKLNDSQAPK

SEQ ID NO: 772 - protein, 58 aa, ARTIFICIAL SEQUENCE
  Engineered IL-6 binding polypeptide
VDAKYAKEERDAWYEIHLLPNLTTDQMAAFISKLFDDPSQSSELLSEAKKLNDSQAPK

SEQ ID NO: 773 - protein, 58 aa, ARTIFICIAL SEQUENCE
  Engineered IL-6 binding polypeptide
VDAKYAKEEAEAWLEIHLLPNLTVQQMAAFISKLFDDPSQSSELLSEAKKLNDSQAPK

SEQ ID NO: 774 - protein, 58 aa, ARTIFICIAL SEQUENCE
  Engineered IL-6 binding polypeptide
VDAKYAKEEAKAWHEIHVLPNLTVRQIAAFISKLFDDPSQSSELLSEAKKLNDSQAPK

SEQ ID NO: 775 - protein, 58 aa, ARTIFICIAL SEQUENCE
  Engineered IL-6 binding polypeptide
VDAKYAKEEASAWFEIHTLPNLTVDQMSAFIIKLFDDPSQSSELLSEAKKLNDSQAPK

SEQ ID NO: 776 - protein, 58 aa, ARTIFICIAL SEQUENCE
  Engineered IL-6 binding polypeptide
VDAKYAKEERKAWYEIHVLPNLTVEQIAAFISKLFDDPSQSSELLSEAKKLNDSQAPK

SEQ ID NO: 777 - protein, 58 aa, ARTIFICIAL SEQUENCE
  Engineered IL-6 binding polypeptide
VDAKYAKEERAAWHEIHVLPNLTTEQRVAFIIKLYDDPSQSSELLSEAKKLNDSQAPK

SEQ ID NO: 778 - protein, 58 aa, ARTIFICIAL SEQUENCE
  Engineered IL-6 binding polypeptide
VDAKYAKEEAQAWYEIHVLPNLTVRQMVAFISKLFDDPSQSSELLSEAKKLNDSQAPK

SEQ ID NO: 779 - protein, 58 aa, ARTIFICIAL SEQUENCE
  Engineered IL-6 binding polypeptide
VDAKYAKEEAQAWWEIHLLPNLTVRQIAAFISKLFDDPSQSSELLSEAKKLNDSQAPK

SEQ ID NO: 780 - protein, 58 aa, ARTIFICIAL SEQUENCE
  Engineered IL-6 binding polypeptide
VDAKYAKEEAAAWTEIHALPNLTVHQMAAFISKLFDDPSQSSELLSEAKKLNDSQAPK

SEQ ID NO: 781 - protein, 58 aa, ARTIFICIAL SEQUENCE
  Engineered IL-6 binding polypeptide
VDAKYAKEERTAWWEIHALPNLTIDQMAAFIIKLYDDPSQSSELLSEAKKLNDSQAPK

SEQ ID NO: 782 - protein, 58 aa, ARTIFICIAL SEQUENCE
  Engineered IL-6 binding polypeptide
VDAKYAKEEHKAWREIHLLPNLTTEQMTAFISKLFDDPSQSSELLSEAKKLNDSQAPK

SEQ ID NO: 783 - protein, 58 aa, ARTIFICIAL SEQUENCE
  Engineered IL-6 binding polypeptide
VDAKYAKEEQRAWREIHLLPNLTVNQMAAFITKLFDDPSQSSELLSEAKKLNDSQAPK

SEQ ID NO: 784 - protein, 58 aa, ARTIFICIAL SEQUENCE
  Engineered IL-6 binding polypeptide
VDAKYAKEERHAWWEIHKLPNLTIRQMAAFISKLFDDPSQSSELLSEAKKLNDSQAPK

SEQ ID NO: 785 - protein, 58 aa, ARTIFICIAL SEQUENCE
  Engineered IL-6 binding polypeptide
VDAKYAKEEARAWHEIHILPNLTVRQISAFISKLFDDPSQSSELLSEAKKLNDSQAPK

SEQ ID NO: 786 - protein, 58 aa, ARTIFICIAL SEQUENCE
  Engineered IL-6 binding polypeptide
VDAKYAKEERQAWFEIHALPNLTVNQMAAFIIKLYDDPSQSSELLSEAKKLNDSQAPK

SEQ ID NO: 787 - protein, 58 aa, ARTIFICIAL SEQUENCE
  Engineered IL-6 binding polypeptide
VDAKYAKEEAQAWSEIHLLPNLTIDQRVAFISKLFDDPSQSSELLSEAKKLNDSQAPK

SEQ ID NO: 788 - protein, 58 aa, ARTIFICIAL SEQUENCE
  Engineered IL-6 binding polypeptide
VDAKYAKEERHAWHEIHILPNLTINQMAAFISKLFDDPSQSSELLSEAKKLNDSQAPK

SEQ ID NO: 789 - protein, 58 aa, ARTIFICIAL SEQUENCE
  Engineered IL-6 binding polypeptide
VDAKYAKEEAKAWAEIHALPNLTVTQMSAFIQKLFDDPSQSSELLSEAKKLNDSQAPK

SEQ ID NO: 790 - protein, 58 aa, ARTIFICIAL SEQUENCE
  Engineered IL-6 binding polypeptide
VDAKYAKEERQAWFEIHILPNLTATQMAAFISKLFDDPSQSSELLSEAKKLNDSQAPK

SEQ ID NO: 791 - protein, 58 aa, ARTIFICIAL SEQUENCE
  Engineered IL-6 binding polypeptide
VDAKYAKEERRAWHEIHVLPNLTVRQMAAFISKLFDDPSQSSELLSEAKKLNDSQAPK

SEQ ID NO: 792 - protein, 58 aa, ARTIFICIAL SEQUENCE
  Engineered IL-6 binding polypeptide
VDAKYAKEEAHAWFEIHILPNLTIDQRSAFISKLFDDPSQSSELLSEAKKLNDSQAPK

SEQ ID NO: 793 - protein, 58 aa, ARTIFICIAL SEQUENCE
  Engineered IL-6 binding polypeptide
VDAKYAKEEARAWWEIHLLPNLTIRQMTAFISKLFDDPSQSSELLSEAKKLNDSQAPK

SEQ ID NO: 794 - protein, 58 aa, ARTIFICIAL SEQUENCE
  Engineered IL-6 binding polypeptide
VDAKYAKEEAEAWHEIHVLPNLTVSQMAAFISKLFDDPSQSSELLSEAKKLNDSQAPK

SEQ ID NO: 795 - protein, 58 aa, ARTIFICIAL SEQUENCE
  Engineered IL-6 binding polypeptide
VDAKYAKEERQAWREIHLLPNLTTDQMSAFISKLFDDPSQSSELLSEAKKLNDSQAPK

SEQ ID NO: 796 - protein, 58 aa, ARTIFICIAL SEQUENCE
  Engineered IL-6 binding polypeptide
VDAKYAKEEATAWREIHLLPNLTVDQMAAFISKLFDDPSQSSELLSEAKKLNDSQAPK

SEQ ID NO: 797 - protein, 58 aa, ARTIFICIAL SEQUENCE
  Engineered IL-6 binding polypeptide
VDAKYAKEERQAWWEIHKLPNLTVTQMAAFISKLFDDPSQSSELLSEAKKLNDSQAPK

SEQ ID NO: 798 - protein, 58 aa, ARTIFICIAL SEQUENCE
  Engineered IL-6 binding polypeptide
VDAKYAKEEARAWREIHLLPNLTISQMAAFISKLFDDPSQSSELLSEAKKLNDSQAPK

SEQ ID NO: 799 - protein, 58 aa, ARTIFICIAL SEQUENCE
  Engineered IL-6 binding polypeptide
VDAKYAKEEAEAWHEIHVLPNLTVEQMAAFISKLFDDPSQSSELLSEAKKLNDSQAPK

SEQ ID NO: 800 - protein, 58 aa, ARTIFICIAL SEQUENCE
  Engineered IL-6 binding polypeptide
VDAKYAKEEAAAWLEIHLLPNLTIDQMAAFISKLFDDPSQSSELLSEAKKLNDSQAPK

SEQ ID NO: 801 - protein, 58 aa, ARTIFICIAL SEQUENCE
  Engineered IL-6 binding polypeptide
VDAKYAKEERDAWYEIHLLPNLTVQQMSAFISKLFDDPSQSSELLSEAKKLNDSQAPK

SEQ ID NO: 802 - protein, 58 aa, ARTIFICIAL SEQUENCE
  Engineered IL-6 binding polypeptide
VDAKYAKEERAAWFEIHTLPNLTVHQMAAFISKLFDDPSQSSELLSEAKKLNDSQAPK

SEQ ID NO: 803 - protein, 58 aa, ARTIFICIAL SEQUENCE
  Engineered IL-6 binding polypeptide
VDAKYAKEEQSAWHEIHTLPNLTVNQMAAFIIKLFDDPSQSSELLSEAKKLNDSQAPK

SEQ ID NO: 804 - protein, 58 aa, ARTIFICIAL SEQUENCE
  Engineered IL-6 binding polypeptide
VDAKYAKEERSAWFEIHILPNLTVRQMAAFIQKLFDDPSQSSELLSEAKKLNDSQAPK

SEQ ID NO: 805 - protein, 58 aa, ARTIFICIAL SEQUENCE
  Engineered IL-6 binding polypeptide
VDAKYAKEEAQAWHEIHVLPNLTVNQMAAFISKLFDDPSQSSELLSEAKKLNDSQAPK

SEQ ID NO: 806 - protein, 58 aa, ARTIFICIAL SEQUENCE
  Engineered IL-6 binding polypeptide
VDAKYAKEEAHAWREIHLLPNLTVSQMAAFIIKLFDDPSQSSELLSEAKKLNDSQAPK

SEQ ID NO: 807 - protein, 58 aa, ARTIFICIAL SEQUENCE
  Engineered IL-6 binding polypeptide
VDAKYAKEEARAWREIHLLPNLTVQQMAAFIQKLFDDPSQSSELLSEAKKLNDSQAPK

SEQ ID NO: 808 - protein, 58 aa, ARTIFICIAL SEQUENCE
  Engineered IL-6 binding polypeptide
VDAKYAKEERQAWYEIHMLPNLTITQLEAFISKLFDDPSQSSELLSEAKKLNDSQAPK

SEQ ID NO: 809 - protein, 58 aa, ARTIFICIAL SEQUENCE
  Engineered IL-6 binding polypeptide
VDAKYAKEEREAWYEIHVLPNLTHHQMEAFIQKLFDDPSQSSELLSEAKKLNDSQAPK

SEQ ID NO: 810 - protein, 58 aa, ARTIFICIAL SEQUENCE
  Engineered IL-6 binding polypeptide
VDAKYAKEERRAWFEIHLLPNLTVTQISAFISKLFDDPSQSSELLSEAKKLNDSQAPK

SEQ ID NO: 811 - protein, 58 aa, ARTIFICIAL SEQUENCE
  Engineered IL-6 binding polypeptide
VDAKYAKEEREAWFEIHALPNLTVDQMSAFIIKLYDDPSQSSELLSEAKKLNDSQAPK

SEQ ID NO: 812 - protein, 58 aa, ARTIFICIAL SEQUENCE
  Engineered IL-6 binding polypeptide
VDAKYAKEEREAWWEIHLLPNLTVEQMAAFIHKLYDDPSQSSELLSEAKKLNDSQAPK

SEQ ID NO: 813 - protein, 58 aa, ARTIFICIAL SEQUENCE
  Engineered IL-6 binding polypeptide
VDAKYAKEEREAWHEIHTLPNLTVHQRAAFISKLFDDPSQSSELLSEAKKLNDSQAPK

SEQ ID NO: 814 - protein, 58 aa, ARTIFICIAL SEQUENCE
  Engineered IL-6 binding polypeptide
VDAKYAKEEAQAWHEIHTLPNLTVDQMAAFISKLFDDPSQSSELLSEAKKLNDSQAPK

SEQ ID NO: 815 - protein, 58 aa, ARTIFICIAL SEQUENCE
  Engineered IL-6 binding polypeptide
VDAKYAKEEQHAWYEIHILPNLTVTQMAAFISKLFDDPSQSSELLSEAKKLNDSQAPK

SEQ ID NO: 816 - protein, 58 aa, ARTIFICIAL SEQUENCE
  Engineered IL-6 binding polypeptide
VDAKYAKEEHHAWYEIHTLPNLTIQQMAAFISKLFDDPSQSSELLSEAKKLNDSQAPK

SEQ ID NO: 817 - protein, 58 aa, ARTIFICIAL SEQUENCE
  Engineered IL-6 binding polypeptide
VDAKYAKEEAHAWYEIHLLPNLTVNQMAAFIQKLFDDPSQSSELLSEAKKLNDSQAPK

SEQ ID NO: 818 - protein, 58 aa, ARTIFICIAL SEQUENCE
  Engineered IL-6 binding polypeptide
VDAKYAKEEAAAWREIHTLPNLTAEQMAAFISKLFDDPSQSSELLSEAKKLNDSQAPK

SEQ ID NO: 819 - protein, 58 aa, ARTIFICIAL SEQUENCE
  Engineered IL-6 binding polypeptide
VDAKYAKEEASAWYEIHLLPNLTVEQMAAFISKLFDDPSQSSELLSEAKKLNDSQAPK

SEQ ID NO: 820 - protein, 58 aa, ARTIFICIAL SEQUENCE
  Engineered IL-6 binding polypeptide
VDAKYAKEERKAWYEIHVLPNLTVDQMAAFIQKLFDDPSQSSELLSEAKKLNDSQAPK

SEQ ID NO: 821 - protein, 58 aa, ARTIFICIAL SEQUENCE
  Engineered IL-6 binding polypeptide
VDAKYAKEEAHAWHEIHILPNLTVNQIAAFISKLFDDPSQSSELLSEAKKLNDSQAPK

SEQ ID NO: 822 - protein, 58 aa, ARTIFICIAL SEQUENCE
  Engineered IL-6 binding polypeptide
VDAKYAKEERRAWAEIHKLPNLTISQIAAFISKLFDDPSQSSELLSEAKKLNDSQAPK

SEQ ID NO: 823 - protein, 58 aa, ARTIFICIAL SEQUENCE
  Engineered IL-6 binding polypeptide
VDAKYAKEEAHAWLEIHALPNLTIEQISAFIIKLYDDPSQSSELLSEAKKLNDSQAPK

SEQ ID NO: 824 - protein, 58 aa, ARTIFICIAL SEQUENCE
  Engineered IL-6 binding polypeptide
VDAKYAKEERTAWYEIHILPNLTIQQMAAFISKLFDDPSQSSELLSEAKKLNDSQAPK

SEQ ID NO: 825 - protein, 58 aa, ARTIFICIAL SEQUENCE
  Engineered IL-6 binding polypeptide
VDAKYAKEERHAWYEIHLLPNLTVTQMAAFISKLFDDPSQSSELLSEAKKLNDSQAPK

SEQ ID NO: 826 - protein, 58 aa, ARTIFICIAL SEQUENCE
  Engineered IL-6 binding polypeptide
VDAKYAKEERRAWYEIHLLPNLTVEQIAAFISKLFDDPSQSSELLSEAKKLNDSQAPK

SEQ ID NO: 827 - protein, 58 aa, ARTIFICIAL SEQUENCE
  Engineered IL-6 binding polypeptide
VDAKYAKEERDAWFEIHALPNLTVTQVAAFISKLFDDPSQSSELLSEAKKLNDSQAPK

SEQ ID NO: 828 - protein, 58 aa, ARTIFICIAL SEQUENCE
  Engineered IL-6 binding polypeptide
VDAKYAKEEQEAWTEIHTLPNLTIDQMTAFIIKLFDDPSQSSELLSEAKKLNDSQAPK

SEQ ID NO: 829 - protein, 58 aa, ARTIFICIAL SEQUENCE
  Engineered IL-6 binding polypeptide
VDAKYAKEEREAWWEIHALPNLTTNQIAAFISKLFDDPSQSSELLSEAKKLNDSQAPK

SEQ ID NO: 830 - protein, 58 aa, ARTIFICIAL SEQUENCE
  Engineered IL-6 binding polypeptide
VDAKYAKEERAAWYEIHLLPNLTVNQMAAFISKLFDDPSQSSELLSEAKKLNDSQAPK

SEQ ID NO: 831 - protein, 58 aa, ARTIFICIAL SEQUENCE
  Engineered IL-6 binding polypeptide
VDAKYAKEEAKAWYEIHILPNLTVTQIAAFISKLFDDPSQSSELLSEAKKLNDSQAPK

SEQ ID NO: 832 - protein, 58 aa, ARTIFICIAL SEQUENCE
  Engineered IL-6 binding polypeptide
VDAKYAKEEREAWHEIHILPNLTVNQMAAFISKLFDDPSQSSELLSEAKKLNDSQAPK

SEQ ID NO: 833 - protein, 58 aa, ARTIFICIAL SEQUENCE
  Engineered IL-6 binding polypeptide
VDAKYAKEERAAWREIHLLPNLTVSQMEAFISKLFDDPSQSSELLSEAKKLNDSQAPK

SEQ ID NO: 834 - protein, 58 aa, ARTIFICIAL SEQUENCE
  Engineered IL-6 binding polypeptide
VDAKYAKEERTAWFEIHTLPNLTVQQMAAFIIKLFDDPSQSSELLSEAKKLNDSQAPK

SEQ ID NO: 835 - protein, 58 aa, ARTIFICIAL SEQUENCE
  Engineered IL-6 binding polypeptide
VDAKYAKEEREAWHEIHILPNLTIEQMAAFIQKLFDDPSQSSELLSEAKKLNDSQAPK

SEQ ID NO: 836 - protein, 58 aa, ARTIFICIAL SEQUENCE
  Engineered IL-6 binding polypeptide
VDAKYAKEERQAWYEIHILPNLTVRQISAFISKLFDDPSQSSELLSEAKKLNDSQAPK

SEQ ID NO: 837 - protein, 58 aa, ARTIFICIAL SEQUENCE
  Engineered IL-6 binding polypeptide
VDAKYAKEEAQAWTEIHILPNLTVSQMAAFIQKLFDDPSQSSELLSEAKKLNDSQAPK

SEQ ID NO: 838 - protein, 58 aa, ARTIFICIAL SEQUENCE
  Engineered IL-6 binding polypeptide
VDAKYAKEEHDAWYEIHTLPNLTVDQVSAFISKLFDDPSQSSELLSEAKKLNDSQAPK

SEQ ID NO: 839 - protein, 58 aa, ARTIFICIAL SEQUENCE
  Engineered IL-6 binding polypeptide
VDAKYAKEEAEAWREIHLLPNLTINQIAAFISKLFDDPSQSSELLSEAKKLNDSQAPK

SEQ ID NO: 840 - protein, 58 aa, ARTIFICIAL SEQUENCE
  Engineered IL-6 binding polypeptide
VDAKYAKEEQSAWTEIHTLPNLTTDQRVAFISKLFDDPSQSSELLSEAKKLNDSQAPK

SEQ ID NO: 841 - protein, 58 aa, ARTIFICIAL SEQUENCE
  Engineered IL-6 binding polypeptide
VDAKYAKEERDAWHEIHLLPNLTIEQRAAFISKLFDDPSQSSELLSEAKKLNDSQAPK

SEQ ID NO: 842 - protein, 58 aa, ARTIFICIAL SEQUENCE
  Engineered IL-6 binding polypeptide
VDAKYAKEEARAWHEIHVLPNLTTDQRVAFISKLFDDPSQSSELLSEAKKLNDSQAPK

SEQ ID NO: 843 - protein, 58 aa, ARTIFICIAL SEQUENCE
  Engineered IL-6 binding polypeptide
VDAKYAKEEADAWFEIHMLPNLTIDQMTAFIMKLFDDPSQSSELLSEAKKLNDSQAPK

SEQ ID NO: 844 - protein, 58 aa, ARTIFICIAL SEQUENCE
  Engineered IL-6 binding polypeptide
VDAKYAKEEAEAWWEIHALPNLTVSQTAAFISKLFDDPSQSSELLSEAKKLNDSQAPK

SEQ ID NO: 845 - protein, 58 aa, ARTIFICIAL SEQUENCE
  Engineered IL-6 binding polypeptide
VDAKYAKEERDAWFEIHALPNLTISQMTAFIIKLYDDPSQSSELLSEAKKLNDSQAPK

SEQ ID NO: 846 - protein, 58 aa, ARTIFICIAL SEQUENCE
  Engineered IL-6 binding polypeptide
VDAKYAKEERRAWYEIHTLPNLTVSQMAAFISKLFDDPSQSSELLSEAKKLNDSQAPK

SEQ ID NO: 847 - protein, 58 aa, ARTIFICIAL SEQUENCE
  Engineered IL-6 binding polypeptide
VDAKYAKEEREAWYEIHLLPNLTTRQMAAFIIKLFDDPSQSSELLSEAKKLNDSQAPK

SEQ ID NO: 848 - protein, 58 aa, ARTIFICIAL SEQUENCE
  Engineered IL-6 binding polypeptide
VDAKYAKEEHDAWYEIHVLPNLTVNQIAAFISKLFDDPSQSSELLSEAKKLNDSQAPK

SEQ ID NO: 849 - protein, 58 aa, ARTIFICIAL SEQUENCE
  Engineered IL-6 binding polypeptide
VDAKYAKEEAHAWAEIHSLPNLTVDQMVAFIQKLFDDPSQSSELLSEAKKLNDSQAPK

SEQ ID NO: 850 - protein, 58 aa, ARTIFICIAL SEQUENCE
  Engineered IL-6 binding polypeptide
VDAKYAKEEREAWWEIHKLPNLTVTQMAAFIQKLFDDPSQSSELLSEAKKLNDSQAPK

SEQ ID NO: 851 - protein, 58 aa, ARTIFICIAL SEQUENCE
  Engineered IL-6 binding polypeptide
VDAKYAKEERVAWYEIHLLPNLTIDQMAAFISKLFDDPSQSSELLSEAKKLNDSQAPK

SEQ ID NO: 852 - protein, 58 aa, ARTIFICIAL SEQUENCE
  Engineered IL-6 binding polypeptide
VDAKYAKEEARAWHEIHILPNLTVSQITAFISKLFDDPSQSSELLSEAKKLNDSQAPK

SEQ ID NO: 853 - protein, 58 aa, ARTIFICIAL SEQUENCE
  Engineered IL-6 binding polypeptide
VDAKYAKEEADAWREIHLLPNLTASQMAAFISKLFDDPSQSSELLSEAKKLNDSQAPK

SEQ ID NO: 854 - protein, 58 aa, ARTIFICIAL SEQUENCE
  Engineered IL-6 binding polypeptide
VDAKYAKEEREAWTEIHSLPNLTVDQMAAFIIKLYDDPSQSSELLSEAKKLNDSQAPK

SEQ ID NO: 855 - protein, 58 aa, ARTIFICIAL SEQUENCE
  Engineered IL-6 binding polypeptide
VDAKYAKEERRAWYEIHLLPNLTIEQMAAFISKLFDDPSQSSELLSEAKKLNDSQAPK

SEQ ID NO: 856 - protein, 58 aa, ARTIFICIAL SEQUENCE
  Engineered IL-6 binding polypeptide
VDAKYAKEEREAWYEIHLLPNLTIDQMAAFISKLFDDPSQSSELLSEAKKLNDSQAPK

SEQ ID NO: 857 - protein, 58 aa, ARTIFICIAL SEQUENCE
  Engineered IL-6 binding polypeptide
VDAKYAKEEARAWYEIHILPNLTVSQMAAFISKLFDDPSQSSELLSEAKKLNDSQAPK

SEQ ID NO: 858 - protein, 58 aa, ARTIFICIAL SEQUENCE
  Engineered IL-6 binding polypeptide
VDAKYAKEERQAWHEIHTLPNLTTDQMAAFISKLFDDPSQSSELLSEAKKLNDSQAPK

SEQ ID NO: 859 - protein, 58 aa, ARTIFICIAL SEQUENCE
  Engineered IL-6 binding polypeptide
VDAKYAKEEHDAWWEIHKLPNLTVNQTAAFISKLFDDPSQSSELLSEAKKLNDSQAPK

SEQ ID NO: 860 - protein, 58 aa, ARTIFICIAL SEQUENCE
  Engineered IL-6 binding polypeptide
VDAKYAKEERTAWHEIHSLPNLTIDQMAAFIIKLFDDPSQSSELLSEAKKLNDSQAPK

SEQ ID NO: 861 - protein, 58 aa, ARTIFICIAL SEQUENCE
  Engineered IL-6 binding polypeptide
VDAKYAKEERAAWWEIHLLPNLTTTQMAAFISKLFDDPSQSSELLSEAKKLNDSQAPK

SEQ ID NO: 862 - protein, 58 aa, ARTIFICIAL SEQUENCE
  Engineered IL-6 binding polypeptide
VDAKYAKEERDAWREIHLLPNLTIDQMAAFISKLFDDPSQSSELLSEAKKLNDSQAPK

SEQ ID NO: 863 - protein, 58 aa, ARTIFICIAL SEQUENCE
  Engineered IL-6 binding polypeptide
VDAKYAKEEQVAWHEIHLLPNLTIDQMTAFISKLFDDPSQSSELLSEAKKLNDSQAPK

SEQ ID NO: 864 - protein, 58 aa, ARTIFICIAL SEQUENCE
  Engineered IL-6 binding polypeptide
VDAKYAKEEAQAWREIHLLPNLTVDQMAAFISKLFDDPSQSSELLSEAKKLNDSQAPK

SEQ ID NO: 865 - protein, 58 aa, ARTIFICIAL SEQUENCE
  Engineered IL-6 binding polypeptide
VDAKYAKEEAKAWFEIHILPNLTVQQVAAFISKLFDDPSQSSELLSEAKKLNDSQAPK

SEQ ID NO: 866 - protein, 58 aa, ARTIFICIAL SEQUENCE
  Engineered IL-6 binding polypeptide
VDAKYAKEEHAAWREITLLPNLTINQRAAFISKLFDDPSQSSELLSEAKKLNDSQAPK

SEQ ID NO: 867 - protein, 58 aa, ARTIFICIAL SEQUENCE
  Engineered IL-6 binding polypeptide
VDAKYAKEEAEAWSEIHKLPNLTVTQMAAFISKLFDDPSQSSELLSEAKKLNDSQAPK

SEQ ID NO: 868 - protein, 58 aa, ARTIFICIAL SEQUENCE
  Engineered IL-6 binding polypeptide
VDAKYAKEEQQAWYEIHLLPNLTVTQMSAFISKLFDDPSQSSELLSEAKKLNDSQAPK

SEQ ID NO: 869 - protein, 58 aa, ARTIFICIAL SEQUENCE
  Engineered IL-6 binding polypeptide
VDAKYAKEEARAWYEIHLLPNLTIEQMAAFISKLFDDPSQSSELLSEAKKLNDSQAPK

SEQ ID NO: 870 - protein, 58 aa, ARTIFICIAL SEQUENCE
  Engineered IL-6 binding polypeptide
VDAKYAKEEAEAWTEIHLLPNLTVEQRVAFISKLFDDPSQSSELLSEAKKLNDSQAPK

SEQ ID NO: 871 - protein, 58 aa, ARTIFICIAL SEQUENCE
  Engineered IL-6 binding polypeptide
VDAKYAKEERQAWTEIHLLPNLTVEQMAAFIQKLFDDPSQSSELLSEAKKLNDSQAPK

SEQ ID NO: 872 - protein, 58 aa, ARTIFICIAL SEQUENCE
  Engineered IL-6 binding polypeptide
VDAKYAKEEYYAWTEIHKLPNLTIDQMAAFITKLFDDPSQSSELLSEAKKLNDSQAPK

SEQ ID NO: 873 - protein, 58 aa, ARTIFICIAL SEQUENCE
  Engineered IL-6 binding polypeptide
VDAKYAKEEQAAWMEIHLLPNLTIDQMAAFITKLFDDPSQSSELLSEAKKLNDSQAPK

SEQ ID NO: 874 - protein, 58 aa, ARTIFICIAL SEQUENCE
  Engineered IL-6 binding polypeptide
VDAKYAKEEYAAWTEIHLLPNLTIDQMAAFITKLFDDPSQSSELLSEAKKLNDSQAPK

SEQ ID NO: 875 - protein, 58 aa, ARTIFICIAL SEQUENCE
  Engineered IL-6 binding polypeptide
VDAKYAKEEKEAWYEIHILPNLTISQMAAFITKLFDDPSQSSELLSEAKKLNDSQAPK

SEQ ID NO: 876 - protein, 58 aa, ARTIFICIAL SEQUENCE
  Engineered IL-6 binding polypeptide
VDAKYAKEEREAWYEIHLLPNLTIVQMAAFISKLFDDPSQSSELLSEAKKLNDSQAPK

SEQ ID NO: 877 - protein, 58 aa, ARTIFICIAL SEQUENCE
  Engineered IL-6 binding polypeptide
VDAKYAKEEYAAWVEIHKLPNLTVDQMAAFITKLFDDPSQSSELLSEAKKLNDSQAPK

SEQ ID NO: 878 - protein, 58 aa, ARTIFICIAL SEQUENCE
  Engineered IL-6 binding polypeptide
VDAKYAKEEAYAWKEIHKLPNLTIEQMAAFITKLFDDPSQSSELLSEAKKLNDSQAPK

SEQ ID NO: 879 - protein, 58 aa, ARTIFICIAL SEQUENCE
  Engineered IL-6 binding polypeptide
VDAKYAKEEKAAWTEIHLLPNLTIFQMAAFISKLFDDPSQSSELLSEAKKLNDSQAPK

SEQ ID NO: 880 - protein, 58 aa, ARTIFICIAL SEQUENCE
  Engineered IL-6 binding polypeptide
VDAKYAKEEKEAWYEIHLLPNLTITQMAAFITKLFDDPSQSSELLSEAKKLNDSQAPK

SEQ ID NO: 881 - protein, 58 aa, ARTIFICIAL SEQUENCE
  Engineered IL-6 binding polypeptide
VDAKYAKEERKAWYEIHLLPNLTVTQMAAFISKLFDDPSQSSELLSEAKKLNDSQAPK

SEQ ID NO: 882 - protein, 58 aa, ARTIFICIAL SEQUENCE
  Engineered IL-6 binding polypeptide
VDAKYAKEEAMAWREIHLLPNLTVNQIAAFITKLFDDPSQSSELLSEAKKLNDSQAPK

SEQ ID NO: 883 - protein, 58 aa, ARTIFICIAL SEQUENCE
  Engineered IL-6 binding polypeptide
VDAKYAKEEKHAWNEIHKLPNLTVEQMAAFITKLFDDPSQSSELLSEAKKLNDSQAPK

SEQ ID NO: 884 - protein, 58 aa, ARTIFICIAL SEQUENCE
  Engineered IL-6 binding polypeptide
VDAKYAKEEYEAWTEIHKLPNLTIDQMAAFITKLFDDPSQSSELLSEAKKLNDSQAPK

SEQ ID NO: 885 - protein, 58 aa, ARTIFICIAL SEQUENCE
  Engineered IL-6 binding polypeptide
VDAKYAKEEWNAWTEIHNLPNLTIDQMAAFITKLFDDPSQSSELLSEAKKLNDSQAPK

SEQ ID NO: 886 - protein, 58 aa, ARTIFICIAL SEQUENCE
  Engineered IL-6 binding polypeptide
VDAKYAKEERAAWTEIHGLPNLTVEQMAAFITKLFDDPSQSSELLSEAKKLNDSQAPK

SEQ ID NO: 887 - protein, 58 aa, ARTIFICIAL SEQUENCE
  Engineered IL-6 binding polypeptide
VDAKYAKEEADAWLEIHNLPNLTISQMAAFITKLFDDPSQSSELLSEAKKLNDSQAPK

SEQ ID NO: 888 - protein, 58 aa, ARTIFICIAL SEQUENCE
  Engineered IL-6 binding polypeptide
VDAKYAKEEKAAWHEIHILPNLTVYQIAAFITKLFDDPSQSSELLSEAKKLNDSQAPK

SEQ ID NO: 889 - protein, 58 aa, ARTIFICIAL SEQUENCE
  Engineered IL-6 binding polypeptide
VDAKYAKEEEKAWWEIHILPNLTIEQMAAFISKLFDDPSQSSELLSEAKKLNDSQAPK

SEQ ID NO: 890 - protein, 58 aa, ARTIFICIAL SEQUENCE
  Engineered IL-6 binding polypeptide
VDAKYAKEEKSAWMEIHLLPNLTIEQMAAFITKLFDDPSQSSELLSEAKKLNDSQAPK

SEQ ID NO: 891 - protein, 58 aa, ARTIFICIAL SEQUENCE
  Engineered IL-6 binding polypeptide
VDAKYAKEEYAAWMEIHRLPNLTIEQIAAFITKLFDDPSQSSELLSEAKKLNDSQAPK

SEQ ID NO: 892 - protein, 58 aa, ARTIFICIAL SEQUENCE
  Engineered IL-6 binding polypeptide
VDAKYAKEEFRAWIEIHTLPNLTVDQMAAFITKLFDDPSQSSELLSEAKKLNDSQAPK

SEQ ID NO: 893 - protein, 58 aa, ARTIFICIAL SEQUENCE
  Engineered IL-6 binding polypeptide
VDAKYAKEEKDAWNEIHKLPNLTIEQIAAFITKLFDDPSQSSELLSEAKKLNDSQAPK

SEQ ID NO: 894 - protein, 58 aa, ARTIFICIAL SEQUENCE
  Engineered IL-6 binding polypeptide
VDAKYAKEEKHAWYEIHLLPNLTVEQMAAFITKLFDDPSQSSELLSEAKKLNDSQAPK

SEQ ID NO: 895 - protein, 58 aa, ARTIFICIAL SEQUENCE
  Engineered IL-6 binding polypeptide
VDAKYAKEEYEAWLEIHLLPNLTVDQMAAFISKLFDDPSQSSELLSEAKKLNDSQAPK

SEQ ID NO: 896 - protein, 58 aa, ARTIFICIAL SEQUENCE
  Engineered IL-6 binding polypeptide
VDAKYAKEEKNAWHEIHRLPNLTVNQMAAFITKLFDDPSQSSELLSEAKKLNDSQAPK

SEQ ID NO: 897 - protein, 58 aa, ARTIFICIAL SEQUENCE
  Engineered IL-6 binding polypeptide
VDAKYAKEEKNAWTEIHNLPNLTISQMAAFITKLFDDPSQSSELLSEAKKLNDSQAPK

SEQ ID NO: 898 - protein, 58 aa, ARTIFICIAL SEQUENCE
  Engineered IL-6 binding polypeptide
VDAKYAKEEAAAWYEIHALPNLTVEQMAAFITKLFDDPSQSSELLSEAKKLNDSQAPK

SEQ ID NO: 899 - protein, 58 aa, ARTIFICIAL SEQUENCE
  Engineered IL-6 binding polypeptide
VDAKYAKEEWNAWMEIHLLPNLTVTQMAAFITKLFDDPSQSSELLSEAKKLNDSQAPK

SEQ ID NO: 900 - protein, 58 aa, ARTIFICIAL SEQUENCE
  Engineered IL-6 binding polypeptide
VDAKYAKEEAKAWHEIHILPNLTVHQIAAFITKLFDDPSQSSELLSEAKKLNDSQAPK

SEQ ID NO: 901 - protein, 58 aa, ARTIFICIAL SEQUENCE
  Engineered IL-6 binding polypeptide
VDAKYAKEERKAWHEIHILPNLTVHQIAAFITKLFDDPSQSSELLSEAKKLNDSQAPK

SEQ ID NO: 902 - protein, 58 aa, ARTIFICIAL SEQUENCE
  Engineered IL-6 binding polypeptide
VDAKYAKEESKAWFEIHALPNLTVEQIAAFITKLFDDPSQSSELLSEAKKLNDSQAPK

SEQ ID NO: 903 - protein, 58 aa, ARTIFICIAL SEQUENCE
  Engineered IL-6 binding polypeptide
VDAKYAKEEKRAWYEIHILPNLTISQIAAFITKLFDDPSQSSELLSEAKKLNDSQAPK

SEQ ID NO: 904 - protein, 58 aa, ARTIFICIAL SEQUENCE
  Engineered IL-6 binding polypeptide
VDAKYAKEEKKAWTEIHVLPNLTISQIAAFISKLFDDPSQSSELLSEAKKLNDSQAPK

SEQ ID NO: 905 - protein, 58 aa, ARTIFICIAL SEQUENCE
  Engineered IL-6 binding polypeptide
VDAKYAKEERDAWFEIHALPNLTIDQMAAFITKLFDDPSQSSELLSEAKKLNDSQAPK

SEQ ID NO: 906 - protein, 58 aa, ARTIFICIAL SEQUENCE
  Engineered IL-6 binding polypeptide
VDAKYAKEEYEAWEEIHRLPNLTIDQMAAFISKLFDDPSQSSELLSEAKKLNDSQAPK

SEQ ID NO: 907 - protein, 58 aa, ARTIFICIAL SEQUENCE
  Engineered IL-6 binding polypeptide
VDAKYAKEERNAWFEIHKLPNLTINQMAAFISKLFDDPSQSSELLSEAKKLNDSQAPK

SEQ ID NO: 908 - protein, 58 aa, ARTIFICIAL SEQUENCE
  Engineered IL-6 binding polypeptide
VDAKYAKEEHHAWNEIHKLPNLTVDQIAAFISKLFDDPSQSSELLSEAKKLNDSQAPK

SEQ ID NO: 909 - protein, 58 aa, ARTIFICIAL SEQUENCE
  Engineered IL-6 binding polypeptide
VDAKYAKEEHYAWKEIHLLPNLTIDQMAAFITKLFDDPSQSSELLSEAKKLNDSQAPK

SEQ ID NO: 910 - protein, 58 aa, ARTIFICIAL SEQUENCE
  Engineered IL-6 binding polypeptide
VDAKYAKEESDAWYEIHLLPNLTIEQMAAFITKLFDDPSQSSELLSEAKKLNDSQAPK

SEQ ID NO: 911 - protein, 58 aa, ARTIFICIAL SEQUENCE
  Engineered IL-6 binding polypeptide
VDAKYAKEEYEAWMEIHLLPNLTIGQMAAFITKLFDDPSQSSELLSEAKKLNDSQAPK

SEQ ID NO: 912 - protein, 58 aa, ARTIFICIAL SEQUENCE
  Engineered IL-6 binding polypeptide
VDAKYAKEEKEAWYEIHLLPNLTVEQMAAFISKLFDDPSQSSELLSEAKKLNDSQAPK

SEQ ID NO: 913 - protein, 58 aa, ARTIFICIAL SEQUENCE
  Engineered IL-6 binding polypeptide
VDAKYAKEERAAWKEIHILPNLTVEQIAAFITKLFDDPSQSSELLSEAKKLNDSQAPK

SEQ ID NO: 914 - protein, 58 aa, ARTIFICIAL SEQUENCE
  Engineered IL-6 binding polypeptide
VDAKYAKEEKEAWYEIHILPNLTVHQMAAFITKLFDDPSQSSELLSEAKKLNDSQAPK

SEQ ID NO: 915 - protein, 58 aa, ARTIFICIAL SEQUENCE
  Engineered IL-6 binding polypeptide
VDAKYAKEEYDAWIEIHALPNLTVDQMAAFISKLFDDPSQSSELLSEAKKLNDSQAPK

SEQ ID NO: 916 - protein, 58 aa, ARTIFICIAL SEQUENCE
  Engineered IL-6 binding polypeptide
VDAKYAKEERKAWTEIHLLPNLTIDQMAAFITKLFDDPSQSSELLSEAKKLNDSQAPK

SEQ ID NO: 917 - protein, 58 aa, ARTIFICIAL SEQUENCE
  Engineered IL-6 binding polypeptide
VDAKYAKEEYHAWVEIHNLPNLTIDQIAAFITKLFDDPSQSSELLSEAKKLNDSQAPK

SEQ ID NO: 918 - protein, 58 aa, ARTIFICIAL SEQUENCE
  Engineered IL-6 binding polypeptide
VDAKYAKEEREAWTEIHKLPNLTIDQMAAFITKLFDDPSQSSELLSEAKKLNDSQAPK

SEQ ID NO: 919 - protein, 58 aa, ARTIFICIAL SEQUENCE
  Engineered IL-6 binding polypeptide
VDAKYAKEEQWAWYEIHLLPNLTVNQMAAFITKLFDDPSQSSELLSEAKKLNDSQAPK

SEQ ID NO: 920 - protein, 58 aa, ARTIFICIAL SEQUENCE
  Engineered IL-6 binding polypeptide
VDAKYAKEEKQAWMEIHKLPNLTVHQVAAFISKLFDDPSQSSELLSEAKKLNDSQAPK

SEQ ID NO: 921 - protein, 58 aa, ARTIFICIAL SEQUENCE
  Engineered IL-6 binding polypeptide
VDAKYAKEESDAWTEIHKLPNLTIDQMAAFITKLFDDPSQSSELLSEAKKLNDSQAPK

SEQ ID NO: 922 - protein, 58 aa, ARTIFICIAL SEQUENCE
  Engineered IL-6 binding polypeptide
VDAKYAKEEAQAWWEIHSLPNLTVDQIAAFITKLFDDPSQSSELLSEAKKLNDSQAPK

SEQ ID NO: 923 - protein, 58 aa, ARTIFICIAL SEQUENCE
  Engineered IL-6 binding polypeptide
VDAKYAKEEKMAWYEIHNLPNLTVNQMAAFITKLFDDPSQSSELLSEAKKLNDSQAPK

SEQ ID NO: 924 - protein, 58 aa, ARTIFICIAL SEQUENCE
  Engineered IL-6 binding polypeptide
VDAKYAKEEWMAWMEIHNLPNLTVNQMAAFITKLFDDPSQSSELLSEAKKLNDSQAPK

SEQ ID NO: 925 - protein, 58 aa, ARTIFICIAL SEQUENCE
  Engineered IL-6 binding polypeptide
VDAKYAKEEARAWYEIHILPNLTVKQMAAFITKLFDDPSQSSELLSEAKKLNDSQAPK

SEQ ID NO: 926 - protein, 58 aa, ARTIFICIAL SEQUENCE
  Engineered IL-6 binding polypeptide
VDAKYAKEEAKAWHEIHILPNLTVSQVAAFITKLFDDPSQSSELLSEAKKLNDSQAPK

SEQ ID NO: 927 - protein, 58 aa, ARTIFICIAL SEQUENCE
  Engineered IL-6 binding polypeptide
VDAKYAKEERAAWHEIHILPNLTVDQMAAFISKLFDDPSQSSELLSEAKKLNDSQAPK

SEQ ID NO: 928 - protein, 58 aa, ARTIFICIAL SEQUENCE
  Engineered IL-6 binding polypeptide
VDAKYAKEEWQAWTEIHLLPNLTLDQVAAFITKLFDDPSQSSELLSEAKKLNDSQAPK

SEQ ID NO: 929 - protein, 58 aa, ARTIFICIAL SEQUENCE
  Engineered IL-6 binding polypeptide
VDAKYAKEEAFAWEEIHRLPNLTIEQMAAFISKLFDDPSQSSELLSEAKKLNDSQAPK

SEQ ID NO: 930 - protein, 58 aa, ARTIFICIAL SEQUENCE
  Engineered IL-6 binding polypeptide
VDAKYAKEERKAWYEIHKLPNLTVDQMAAFITKLFDDPSQSSELLSEAKKLNDSQAPK

SEQ ID NO: 931 - protein, 58 aa, ARTIFICIAL SEQUENCE
  Engineered IL-6 binding polypeptide
VDAKYAKEEKQAWYEIHLLPNLTVEQMAAFITKLFDDPSQSSELLSEAKKLNDSQAPK

SEQ ID NO: 932 - protein, 58 aa, ARTIFICIAL SEQUENCE
  Engineered IL-6 binding polypeptide
VDAKYAKEEYDAWWEIHLLPNLTVDQMAAFITKLFDDPSQSSELLSEAKKLNDSQAPK

SEQ ID NO: 933 - protein, 58 aa, ARTIFICIAL SEQUENCE
  Engineered IL-6 binding polypeptide
VDAKYAKEEHDAWNEIHLLPNLTIDQMAAFITKLFDDPSQSSELLSEAKKLNDSQAPK

SEQ ID NO: 934 - protein, 58 aa, ARTIFICIAL SEQUENCE
  Engineered IL-6 binding polypeptide
VDAKYAKEEYTAWTEIHQLPNLTVQQMAAFITKLFDDPSQSSELLSEAKKLNDSQAPK

SEQ ID NO: 935 - protein, 58 aa, ARTIFICIAL SEQUENCE
  Engineered IL-6 binding polypeptide
VDAKYAKEEARAWHEIHILPNLTVRQIAAFITKLFDDPSQSSELLSEAKKLNDSQAPK

SEQ ID NO: 936 - protein, 58 aa, ARTIFICIAL SEQUENCE
  Engineered IL-6 binding polypeptide
VDAKYAKEERNAWFEIHQLPNLTVHQVAAFITKLFDDPSQSSELLSEAKKLNDSQAPK

SEQ ID NO: 937 - protein, 58 aa, ARTIFICIAL SEQUENCE
  Engineered IL-6 binding polypeptide
VDAKYAKEEADAWYEIHLLPNLTVEQMAAFITKLFDDPSQSSELLSEAKKLNDSQAPK

SEQ ID NO: 938 - protein, 58 aa, ARTIFICIAL SEQUENCE
  Engineered IL-6 binding polypeptide
VDAKYAKEEFEAWKEIHILPNLTVDQMAAFITKLFDDPSQSSELLSEAKKLNDSQAPK

SEQ ID NO: 939 - protein, 58 aa, ARTIFICIAL SEQUENCE
  Engineered IL-6 binding polypeptide
VDAKYAKEEAYAWWEIHKLPNLTVHQMAAFITKLFDDPSQSSELLSEAKKLNDSQAPK

SEQ ID NO: 940 - protein, 58 aa, ARTIFICIAL SEQUENCE
  Engineered IL-6 binding polypeptide
VDAKYAKEEKTAWHEIHNLPNLTIDQMAAFITKLFDDPSQSSELLSEAKKLNDSQAPK

SEQ ID NO: 941 - protein, 58 aa, ARTIFICIAL SEQUENCE
  Engineered IL-6 binding polypeptide
VDAKYAKEEAKAWNEIHKLPNLTIDQIAAFISKLFDDPSQSSELLSEAKKLNDSQAPK

SEQ ID NO: 942 - protein, 58 aa, ARTIFICIAL SEQUENCE
  Engineered IL-6 binding polypeptide
VDAKYAKEEKDAWIEIHNLPNLTVEQMAAFITKLFDDPSQSSELLSEAKKLNDSQAPK

SEQ ID NO: 943 - protein, 58 aa, ARTIFICIAL SEQUENCE
  Engineered IL-6 binding polypeptide
VDAKYAKEEFFAWKEIHLLPNLTVEQIAAFITKLFDDPSQSSELLSEAKKLNDSQAPK

SEQ ID NO: 944 - protein, 58 aa, ARTIFICIAL SEQUENCE
  Engineered IL-6 binding polypeptide
VDAKYAKEEQAAWLEIHLLPNLTVSQIAAFITKLFDDPSQSSELLSEAKKLNDSQAPK

SEQ ID NO: 945 - protein, 58 aa, ARTIFICIAL SEQUENCE
  Engineered IL-6 binding polypeptide
VDAKYAKEEYFAWREIHVLPNLTVDQMAAFISKLFDDPSQSSELLSEAKKLNDSQAPK

SEQ ID NO: 946 - protein, 58 aa, ARTIFICIAL SEQUENCE
  Engineered IL-6 binding polypeptide
VDAKYAKEEYYAWREIHLLPNLTITQMAAFITKLFDDPSQSSELLSEAKKLNDSQAPK

SEQ ID NO: 947 - protein, 58 aa, ARTIFICIAL SEQUENCE
  Engineered IL-6 binding polypeptide
VDAKYAKEEKMAWTEIHLLPNLTISQMAAFITKLFDDPSQSSELLSEAKKLNDSQAPK

SEQ ID NO: 948 - protein, 58 aa, ARTIFICIAL SEQUENCE
  Engineered IL-6 binding polypeptide
VDAKYAKEERNAWFEIHVLPNLTVKQMAAFITKLFDDPSQSSELLSEAKKLNDSQAPK

SEQ ID NO: 949 - protein, 58 aa, ARTIFICIAL SEQUENCE
  Engineered IL-6 binding polypeptide
VDAKYAKEEKRAWTEIHILPNLTVEQMAAFISKLFDDPSQSSELLSEAKKLNDSQAPK

SEQ ID NO: 950 - protein, 58 aa, ARTIFICIAL SEQUENCE
  Engineered IL-6 binding polypeptide
VDAKYAKEEAAAWKEIHLLPNLTIDQMAAFITKLFDDPSQSSELLSEAKKLNDSQAPK

SEQ ID NO: 951 - protein, 58 aa, ARTIFICIAL SEQUENCE
  Engineered IL-6 binding polypeptide
VDAKYAKEEKEAWMEIHALPNLTVDQVAAFITKLFDDPSQSSELLSEAKKLNDSQAPK

SEQ ID NO: 952 - protein, 58 aa, ARTIFICIAL SEQUENCE
  Engineered IL-6 binding polypeptide
VDAKYAKEEKEAWYEIHNLPNLTIIQMAAFISKLFDDPSQSSELLSEAKKLNDSQAPK

SEQ ID NO: 953 - protein, 58 aa, ARTIFICIAL SEQUENCE
  Engineered IL-6 binding polypeptide
VDAKYAKEEYDAWFEIHILPNLTVHQIAAFITKLFDDPSQSSELLSEAKKLNDSQAPK

SEQ ID NO: 954 - protein, 58 aa, ARTIFICIAL SEQUENCE
  Engineered IL-6 binding polypeptide
VDAKYAKEEYGAWNEIHKLPNLTIDQMAAFITKLFDDPSQSSELLSEAKKLNDSQAPK

SEQ ID NO: 955 - protein, 58 aa, ARTIFICIAL SEQUENCE
  Engineered IL-6 binding polypeptide
VDAKYAKEEWQAWMEIHSLPNLTVDQMAAFITKLFDDPSQSSELLSEAKKLNDSQAPK

SEQ ID NO: 956 - protein, 58 aa, ARTIFICIAL SEQUENCE
  Engineered IL-6 binding polypeptide
VDAKYAKEEWNAWFEIHKLPNLTVEQMAAFITKLFDDPSQSSELLSEAKKLNDSQAPK

SEQ ID NO: 957 - protein, 58 aa, ARTIFICIAL SEQUENCE
  Engineered IL-6 binding polypeptide
VDAKYAKEEANAWKEIHLLPNLTVDQMAAFITKLFDDPSQSSELLSEAKKLNDSQAPK

SEQ ID NO: 958 - protein, 58 aa, ARTIFICIAL SEQUENCE
  Engineered IL-6 binding polypeptide
VDAKYAKEEYEAWTEIHLLPNLTVHQMAAFITKLFDDPSQSSELLSEAKKLNDSQAPK

SEQ ID NO: 959 - protein, 58 aa, ARTIFICIAL SEQUENCE
  Engineered IL-6 binding polypeptide
VDAKYAKEERIAWWEIHSLPNLTVNQVAAFISKLFDDPSQSSELLSEAKKLNDSQAPK

SEQ ID NO: 960 - protein, 58 aa, ARTIFICIAL SEQUENCE
  Engineered IL-6 binding polypeptide
VDAKYAKEEYNAWVEIHTLPNLTVNQMAAFITKLFDDPSQSSELLSEAKKLNDSQAPK

SEQ ID NO: 961 - protein, 58 aa, ARTIFICIAL SEQUENCE
  Engineered IL-6 binding polypeptide
VDAKYAKEEAFAWSEIHILPNLTIDQIAAFITKLFDDPSQSSELLSEAKKLNDSQAPK

SEQ ID NO: 962 - protein, 58 aa, ARTIFICIAL SEQUENCE
  Engineered IL-6 binding polypeptide
VDAKYAKEEAHAWHEIHILPNLTIDQMAAFISKLFDDPSQSSELLSEAKKLNDSQAPK

SEQ ID NO: 963 - protein, 58 aa, ARTIFICIAL SEQUENCE
  Engineered IL-6 binding polypeptide
VDAKYAKEEAAAWNEIHRLPNLTVDQIAAFISKLFDDPSQSSELLSEAKKLNDSQAPK

SEQ ID NO: 964 - protein, 58 aa, ARTIFICIAL SEQUENCE
  Engineered IL-6 binding polypeptide
VDAKYAKEEKAAWTEIHLLPNLTVDQMAAFITKLFDDPSQSSELLSEAKKLNDSQAPK

SEQ ID NO: 965 - protein, 58 aa, ARTIFICIAL SEQUENCE
  Engineered IL-6 binding polypeptide
VDAKYAKEEKGAWNEIHLLPNLTIQQMAAFISKLFDDPSQSSELLSEAKKLNDSQAPK

SEQ ID NO: 966 - protein, 58 aa, ARTIFICIAL SEQUENCE
  Engineered IL-6 binding polypeptide
VDAKYAKEEYAAWMEIHSLPNLTVDQMAAFITKLFDDPSQSSELLSEAKKLNDSQAPK

SEQ ID NO: 967 - protein, 58 aa, ARTIFICIAL SEQUENCE
  Engineered IL-6 binding polypeptide
VDAKYAKEEAAAWKEIHILPNLTIEQIAAFISKLFDDPSQSSELLSEAKKLNDSQAPK

SEQ ID NO: 968 - protein, 58 aa, ARTIFICIAL SEQUENCE
  Engineered IL-6 binding polypeptide
VDAKYAKEEKFAWNEIHILPNLTVHQIAAFITKLFDDPSQSSELLSEAKKLNDSQAPK

SEQ ID NO: 969 - protein, 58 aa, ARTIFICIAL SEQUENCE
  Engineered IL-6 binding polypeptide
VDAKYAKEEYNAWLEIHKLPNLTINQMAAFITKLFDDPSQSSELLSEAKKLNDSQAPK

SEQ ID NO: 970 - protein, 58 aa, ARTIFICIAL SEQUENCE
  Engineered IL-6 binding polypeptide
VDAKYAKEEHTAWLEIHSLPNLTIEQVAAFITKLFDDPSQSSELLSEAKKLNDSQAPK

SEQ ID NO: 971 - protein, 58 aa, ARTIFICIAL SEQUENCE
  Engineered IL-6 binding polypeptide
VDAKYAKEEKDAWMEIHILPNLTVDQMAAFITKLFDDPSQSSELLSEAKKLNDSQAPK

SEQ ID NO: 972 - protein, 58 aa, ARTIFICIAL SEQUENCE
  Engineered IL-6 binding polypeptide
VDAKYAKEEATAWIEIHSLPNLTVDQMAAFITKLFDDPSQSSELLSEAKKLNDSQAPK

SEQ ID NO: 973 - protein, 58 aa, ARTIFICIAL SEQUENCE
  Engineered IL-6 binding polypeptide
VDAKYAKEEKEAWWEIHLLPNLTVDQMAAFITKLFDDPSQSSELLSEAKKLNDSQAPK

SEQ ID NO: 974 - protein, 58 aa, ARTIFICIAL SEQUENCE
  Engineered IL-6 binding polypeptide
VDAKYAKEEQHAWIEIHKLPNLTVDQMAAFITKLFDDPSQSSELLSEAKKLNDSQAPK

SEQ ID NO: 975 - protein, 58 aa, ARTIFICIAL SEQUENCE
  Engineered IL-6 binding polypeptide
VDAKYAKEEKHAWHEIHILPNLTIEQMAAFISKLFDDPSQSSELLSEAKKLNDSQAPK

SEQ ID NO: 976 - protein, 58 aa, ARTIFICIAL SEQUENCE
  Engineered IL-6 binding polypeptide
VDAKYAKEEAKAWHEIHILPNLTIEQMAAFITKLFDDPSQSSELLSEAKKLNDSQAPK

SEQ ID NO: 977 - protein, 58 aa, ARTIFICIAL SEQUENCE
  Engineered IL-6 binding polypeptide
VDAKYAKEEKKAWTEIHILPNLTVEQIAAFITKLFDDPSQSSELLSEAKKLNDSQAPK

SEQ ID NO: 978 - protein, 58 aa, ARTIFICIAL SEQUENCE
  Engineered IL-6 binding polypeptide
VDAKYAKEERAAWYEIHVLPNLTVSQMAAFISKLFDDPSQSSELLSEAKKLNDSQAPK

SEQ ID NO: 979 - protein, 58 aa, ARTIFICIAL SEQUENCE
  Engineered IL-6 binding polypeptide
VDAKYAKEERFAWAEIHKLPNLTIDQMAAFITKLFDDPSQSSELLSEAKKLNDSQAPK

SEQ ID NO: 980 - protein, 58 aa, ARTIFICIAL SEQUENCE
  Engineered IL-6 binding polypeptide
VDAKYAKEEYAAWFEIHLLPNLTIDQMAAFISKLFDDPSQSSELLSEAKKLNDSQAPK

SEQ ID NO: 981 - protein, 58 aa, ARTIFICIAL SEQUENCE
  Engineered IL-6 binding polypeptide
VDAKYAKEEYDAWFEIHLLPNLTIDQMAAFISKLFDDPSQSSELLSEAKKLNDSQAPK

SEQ ID NO: 982 - protein, 58 aa, ARTIFICIAL SEQUENCE
  Engineered IL-6 binding polypeptide
VDAKYAKEEWEAWMEIHALPNLTVDQMAAFITKLFDDPSQSSELLSEAKKLNDSQAPK

SEQ ID NO: 983 - protein, 58 aa, ARTIFICIAL SEQUENCE
  Engineered IL-6 binding polypeptide
VDAKYAKEEKDAWWEIHALPNLTIEQMAAFITKLFDDPSQSSELLSEAKKLNDSQAPK

SEQ ID NO: 984 - protein, 58 aa, ARTIFICIAL SEQUENCE
  Engineered IL-6 binding polypeptide
VDAKYAKEERDAWFEIHSLPNLTVDQMAAFITKLFDDPSQSSELLSEAKKLNDSQAPK

SEQ ID NO: 985 - protein, 58 aa, ARTIFICIAL SEQUENCE
  Engineered IL-6 binding polypeptide
VDAKYAKEEFYAWLEIHKLPNLTVSQMAAFITKLFDDPSQSSELLSEAKKLNDSQAPK

SEQ ID NO: 986 - protein, 58 aa, ARTIFICIAL SEQUENCE
  Engineered IL-6 binding polypeptide
VDAKYAKEEYEAWYEIHILPNLTVDQMAAFITKLFDDPSQSSELLSEAKKLNDSQAPK

SEQ ID NO: 987 - protein, 58 aa, ARTIFICIAL SEQUENCE
  Engineered IL-6 binding polypeptide
VDAKYAKEERDAWFEIHLLPNLTVNQMAAFITKLFDDPSQSSELLSEAKKLNDSQAPK

SEQ ID NO: 988 - protein, 58 aa, ARTIFICIAL SEQUENCE
  Engineered IL-6 binding polypeptide
VDAKYAKEEYRAWTEIHILPNLTITQIAAFITKLFDDPSQSSELLSEAKKLNDSQAPK

SEQ ID NO: 989 - protein, 58 aa, ARTIFICIAL SEQUENCE
  Engineered IL-6 binding polypeptide
VDAKYAKEEYEAWTEIHLLPNLTIEQMAAFISKLFDDPSQSSELLSEAKKLNDSQAPK

SEQ ID NO: 990 - protein, 58 aa, ARTIFICIAL SEQUENCE
  Engineered IL-6 binding polypeptide
VDAKYAKEEYDAWLEIHILPNLTVEQIAAFITKLFDDPSQSSELLSEAKKLNDSQAPK

SEQ ID NO: 991 - protein, 58 aa, ARTIFICIAL SEQUENCE
  Engineered IL-6 binding polypeptide
VDAKYAKEERKAWYEIHSLPNLTVDQMAAFITKLFDDPSQSSELLSEAKKLNDSQAPK

SEQ ID NO: 992 - protein, 58 aa, ARTIFICIAL SEQUENCE
  Engineered IL-6 binding polypeptide
VDAKYAKEEHTAWTEIHRLPNLTIEQMAAFITKLFDDPSQSSELLSEAKKLNDSQAPK

SEQ ID NO: 993 - protein, 58 aa, ARTIFICIAL SEQUENCE
  Engineered IL-6 binding polypeptide
VDAKYAKEEYQAWTEIHLLPNLTVEQMAAFITKLFDDPSQSSELLSEAKKLNDSQAPK

SEQ ID NO: 994 - protein, 58 aa, ARTIFICIAL SEQUENCE
  Engineered IL-6 binding polypeptide
VDAKYAKEERMAWFEIHSLPNLTVDQMAAFITKLFDDPSQSSELLSEAKKLNDSQAPK

SEQ ID NO: 995 - protein, 58 aa, ARTIFICIAL SEQUENCE
  Engineered IL-6 binding polypeptide
VDAKYAKEEYDAWYEIHILPNLTVEQIAAFITKLFDDPSQSSELLSEAKKLNDSQAPK

SEQ ID NO: 996 - protein, 58 aa, ARTIFICIAL SEQUENCE
  Engineered IL-6 binding polypeptide
VDAKYAKEEKEAWMEIHLLPNLTIDQMAAFITKLFDDPSQSSELLSEAKKLNDSQAPK

SEQ ID NO: 997 - protein, 58 aa, ARTIFICIAL SEQUENCE
  Engineered IL-6 binding polypeptide
VDAKYAKEEYDAWFEIHSLPNLTVNQMAAFITKLFDDPSQSSELLSEAKKLNDSQAPK

SEQ ID NO: 998 - protein, 58 aa, ARTIFICIAL SEQUENCE
  Engineered IL-6 binding polypeptide
VDAKYAKEEAFAWREIHILPNLTIDQMAAFITKLFDDPSQSSELLSEAKKLNDSQAPK

SEQ ID NO: 999 - protein, 58 aa, ARTIFICIAL SEQUENCE
  Engineered IL-6 binding polypeptide
VDAKYAKEERKAWMEIHLLPNLTIEQMAAFITKLFDDPSQSSELLSEAKKLNDSQAPK

SEQ ID NO: 1000 - protein, 58 aa, ARTIFICIAL SEQUENCE
  Engineered IL-6 binding polypeptide
VDAKYAKEEKAAWIEIHNLPNLTVDQMAAFITKLFDDPSQSSELLSEAKKLNDSQAPK

SEQ ID NO: 1001 - protein, 58 aa, ARTIFICIAL SEQUENCE
  Engineered IL-6 binding polypeptide
VDAKYAKEERNAWIEIHNLPNLTIEQMAAFITKLFDDPSQSSELLSEAKKLNDSQAPK

SEQ ID NO: 1002 - protein, 58 aa, ARTIFICIAL SEQUENCE
  Engineered IL-6 binding polypeptide
VDAKYAKEEKNAWTEIHLLPNLTIEQMAAFITKLFDDPSQSSELLSEAKKLNDSQAPK

SEQ ID NO: 1003 - protein, 58 aa, ARTIFICIAL SEQUENCE
  Engineered IL-6 binding polypeptide
VDAKYAKEEAEAWWEIHILPNLTIDQMAAFITKLFDDPSQSSELLSEAKKLNDSQAPK

SEQ ID NO: 1004 - protein, 58 aa, ARTIFICIAL SEQUENCE
  Engineered IL-6 binding polypeptide
VDAKYAKEEKLAWWEIHKLPNLTVDQMAAFITKLFDDPSQSSELLSEAKKLNDSQAPK

SEQ ID NO: 1005 - protein, 58 aa, ARTIFICIAL SEQUENCE
  Engineered IL-6 binding polypeptide
VDAKYAKEEYEAWYEIHILPNLTIHQMAAFITKLFDDPSQSSELLSEAKKLNDSQAPK

SEQ ID NO: 1006 - protein, 58 aa, ARTIFICIAL SEQUENCE
  Engineered IL-6 binding polypeptide
VDAKYAKEEARAWKEIHLLPNLTVGQIAAFITKLFDDPSQSSELLSEAKKLNDSQAPK

SEQ ID NO: 1007 - protein, 58 aa, ARTIFICIAL SEQUENCE
  Engineered IL-6 binding polypeptide
VDAKYAKEEKQAWMEIHLLPNLTVDQMAAFITKLFDDPSQSSELLSEAKKLNDSQAPK

SEQ ID NO: 1008 - protein, 58 aa, ARTIFICIAL SEQUENCE
  Engineered IL-6 binding polypeptide
VDAKYAKEEAAAWHEIHILPNLTVHQIAAFITKLFDDPSQSSELLSEAKKLNDSQAPK

SEQ ID NO: 1009 - protein, 58 aa, ARTIFICIAL SEQUENCE
  Engineered IL-6 binding polypeptide
VDAKYAKEEKEAWFEIHKLPNLTVSQMAAFITKLFDDPSQSSELLSEAKKLNDSQAPK

SEQ ID NO: 1010 - protein, 58 aa, ARTIFICIAL SEQUENCE
  Engineered IL-6 binding polypeptide
VDAKYAKEEKEAWFEIHTLPNLTVDQMAAFISKLFDDPSQSSELLSEAKKLNDSQAPK

SEQ ID NO: 1011 - protein, 58 aa, ARTIFICIAL SEQUENCE
  Engineered IL-6 binding polypeptide
VDAKYAKEEYLAWVEIHNLPNLTIDQMAAFITKLFDDPSQSSELLSEAKKLNDSQAPK

SEQ ID NO: 1012 - protein, 58 aa, ARTIFICIAL SEQUENCE
  Engineered IL-6 binding polypeptide
VDAKYAKEERDAWYEIHNLPNLTVGQMAAFITKLFDDPSQSSELLSEAKKLNDSQAPK

SEQ ID NO: 1013 - protein, 58 aa, ARTIFICIAL SEQUENCE
  Engineered IL-6 binding polypeptide
VDAKYAKEESAAWFEIHLLPNLTINQMAAFITKLFDDPSQSSELLSEAKKLNDSQAPK

SEQ ID NO: 1014 - protein, 58 aa, ARTIFICIAL SEQUENCE
  Engineered IL-6 binding polypeptide
VDAKYAKEEQYAWTEIHILPNLTVNQIAAFITKLFDDPSQSSELLSEAKKLNDSQAPK

SEQ ID NO: 1015 - protein, 58 aa, ARTIFICIAL SEQUENCE
  Engineered IL-6 binding polypeptide
VDAKYAKEEKRAWMEIHLLPNLTVSQMAAFITKLFDDPSQSSELLSEAKKLNDSQAPK

SEQ ID NO: 1016 - protein, 58 aa, ARTIFICIAL SEQUENCE
  Engineered IL-6 binding polypeptide
VDAKYAKEEKKAWFEIHLLPNLTIHQVAAFISKLFDDPSQSSELLSEAKKLNDSQAPK

SEQ ID NO: 1017 - protein, 58 aa, ARTIFICIAL SEQUENCE
  Engineered IL-6 binding polypeptide
VDAKYAKEEKEAWYEIHSLPNLTVDQVAAFITKLFDDPSQSSELLSEAKKLNDSQAPK

SEQ ID NO: 1018 - protein, 58 aa, ARTIFICIAL SEQUENCE
  Engineered IL-6 binding polypeptide
VDAKYAKEEWLAWNEIHLLPNLTISQIAAFISKLFDDPSQSSELLSEAKKLNDSQAPK

SEQ ID NO: 1019 - protein, 58 aa, ARTIFICIAL SEQUENCE
  Engineered IL-6 binding polypeptide
VDAKYAKEEYNAWLEIHILPNLTVHQIAAFISKLFDDPSQSSELLSEAKKLNDSQAPK

SEQ ID NO: 1020 - protein, 58 aa, ARTIFICIAL SEQUENCE
  Engineered IL-6 binding polypeptide
VDAKYAKEEHTAWMEIHRLPNLTIDQIAAFISKLFDDPSQSSELLSEAKKLNDSQAPK

SEQ ID NO: 1021 - protein, 58 aa, ARTIFICIAL SEQUENCE
  Engineered IL-6 binding polypeptide
VDAKYAKEEKFAWTEIHLLPNLTVHQMAAFITKLFDDPSQSSELLSEAKKLNDSQAPK

SEQ ID NO: 1022 - protein, 58 aa, ARTIFICIAL SEQUENCE
  Engineered IL-6 binding polypeptide
VDAKYAKEEKYAWTEIHILPNLTVNQMAAFITKLFDDPSQSSELLSEAKKLNDSQAPK

SEQ ID NO: 1023 - protein, 58 aa, ARTIFICIAL SEQUENCE
  Engineered IL-6 binding polypeptide
VDAKYAKEEKFAWHEIHKLPNLTVDQIAAFITKLFDDPSQSSELLSEAKKLNDSQAPK

SEQ ID NO: 1024 - protein, 58 aa, ARTIFICIAL SEQUENCE
  Engineered IL-6 binding polypeptide
VDAKYAKEERKAWYEIHGLPNLTVEQMAAFITKLFDDPSQSSELLSEAKKLNDSQAPK

SEQ ID NO: 1025 - protein, 58 aa, ARTIFICIAL SEQUENCE
  Engineered IL-6 binding polypeptide
VDAKYAKEEYQAWLEIHLLPNLTVDQIAAFITKLFDDPSQSSELLSEAKKLNDSQAPK

SEQ ID NO: 1026 - protein, 58 aa, ARTIFICIAL SEQUENCE
  Engineered IL-6 binding polypeptide
VDAKYAKEEKHAWMEIHLLPNLTVEQMAAFITKLFDDPSQSSELLSEAKKLNDSQAPK

SEQ ID NO: 1027 - protein, 58 aa, ARTIFICIAL SEQUENCE
  Engineered IL-6 binding polypeptide
VDAKYAKEEKQAWREIHLLPNLTVDQIAAFISKLFDDPSQSSELLSEAKKLNDSQAPK

SEQ ID NO: 1028 - protein, 58 aa, ARTIFICIAL SEQUENCE
  Engineered IL-6 binding polypeptide
VDAKYAKEEAMAWTEIHLLPNLTVSQMAAFITKLFDDPSQSSELLSEAKKLNDSQAPK

SEQ ID NO: 1029 - protein, 58 aa, ARTIFICIAL SEQUENCE
  Engineered IL-6 binding polypeptide
VDAKYAKEEKHAWREIHLLPNLTLNQMAAFITKLFDDPSQSSELLSEAKKLNDSQAPK

SEQ ID NO: 1030 - protein, 58 aa, ARTIFICIAL SEQUENCE
  Engineered IL-6 binding polypeptide
VDAKYAKEERYAWNEIHALPNLTVEQVAAFITKLFDDPSQSSELLSEAKKLNDSQAPK

SEQ ID NO: 1031 - protein, 58 aa, ARTIFICIAL SEQUENCE
  Engineered IL-6 binding polypeptide
VDAKYAKEEREAWWEIHKLPNLTVDQMAAFISKLFDDPSQSSELLSEAKKLNDSQAPK

SEQ ID NO: 1032 - protein, 58 aa, ARTIFICIAL SEQUENCE
  Engineered IL-6 binding polypeptide
VDAKYAKEEHRAWTEIHLLPNLTVDQMAAFISKLFDDPSQSSELLSEAKKLNDSQAPK

SEQ ID NO: 1033 - protein, 58 aa, ARTIFICIAL SEQUENCE
  Engineered IL-6 binding polypeptide
VDAKYAKEEAYAWAEIHKLPNLTVVQMAAFISKLFDDPSQSSELLSEAKKLNDSQAPK

SEQ ID NO: 1034 - protein, 58 aa, ARTIFICIAL SEQUENCE
  Engineered IL-6 binding polypeptide
VDAKYAKEEYFAWTEIHKLPNLTIDQIAAFITKLFDDPSQSSELLSEAKKLNDSQAPK

SEQ ID NO: 1035 - protein, 58 aa, ARTIFICIAL SEQUENCE
  Engineered IL-6 binding polypeptide
VDAKYAKEEAHAWQEIHKLPNLTINQIAAFISKLFDDPSQSSELLSEAKKLNDSQAPK

SEQ ID NO: 1036 - protein, 58 aa, ARTIFICIAL SEQUENCE
  Engineered IL-6 binding polypeptide
VDAKYAKEEKHAWTEIHKLPNLTIDQMAAFITKLFDDPSQSSELLSEAKKLNDSQAPK

SEQ ID NO: 1037 - protein, 58 aa, ARTIFICIAL SEQUENCE
  Engineered IL-6 binding polypeptide
VDAKYAKEEYRAWYEIHILPNLTVKQMAAFITKLFDDPSQSSELLSEAKKLNDSQAPK

SEQ ID NO: 1038 - protein, 58 aa, ARTIFICIAL SEQUENCE
  Engineered IL-6 binding polypeptide
VDAKYAKEEANAWIEIHKLPNLTVDQMAAFITKLFDDPSQSSELLSEAKKLNDSQAPK

SEQ ID NO: 1039 - protein, 58 aa, ARTIFICIAL SEQUENCE
  Engineered IL-6 binding polypeptide
VDAKYAKEEKDAWTEIHKLPNLTIDQMAAFITKLFDDPSQSSELLSEAKKLNDSQAPK

SEQ ID NO: 1040 - protein, 58 aa, ARTIFICIAL SEQUENCE
  Engineered IL-6 binding polypeptide
VDAKYAKEEREAWYEIHNLPNLTIIQMAAFISKLFDDPSQSSELLSEAKKLNDSQAPK

SEQ ID NO: 1041 - protein, 58 aa, ARTIFICIAL SEQUENCE
  Engineered IL-6 binding polypeptide
VDAKYAKEEYYAWNEIHLLPNLTIEQMAAFITKLFDDPSQSSELLSEAKKLNDSQAPK

SEQ ID NO: 1042 - protein, 58 aa, ARTIFICIAL SEQUENCE
  Engineered IL-6 binding polypeptide
VDAKYAKEEKTAWREIHLLPNLTIDQIAAFITKLFDDPSQSSELLSEAKKLNDSQAPK

SEQ ID NO: 1043 - protein, 58 aa, ARTIFICIAL SEQUENCE
  Engineered IL-6 binding polypeptide
VDAKYAKEEAHAWREIHILPNLTLDQMAAFITKLFDDPSQSSELLSEAKKLNDSQAPK

SEQ ID NO: 1044 - protein, 58 aa, ARTIFICIAL SEQUENCE
  Engineered IL-6 binding polypeptide
VDAKYAKEEAAAWLEIHQLPNLTVDQMAAFITKLFDDPSQSSELLSEAKKLNDSQAPK

SEQ ID NO: 1045 - protein, 58 aa, ARTIFICIAL SEQUENCE
  Engineered IL-6 binding polypeptide
VDAKYAKEEAEAWLEIHILPNLTVEQMAAFITKLFDDPSQSSELLSEAKKLNDSQAPK

SEQ ID NO: 1046 - protein, 58 aa, ARTIFICIAL SEQUENCE
  Engineered IL-6 binding polypeptide
VDAKYAKEEANAWFEIHILPNLTVQQMAAFITKLFDDPSQSSELLSEAKKLNDSQAPK

SEQ ID NO: 1047 - protein, 58 aa, ARTIFICIAL SEQUENCE
  Engineered IL-6 binding polypeptide
VDAKYAKEERYAWMEIHLLPNLTINQMAAFITKLFDDPSQSSELLSEAKKLNDSQAPK

SEQ ID NO: 1048 - protein, 58 aa, ARTIFICIAL SEQUENCE
  Engineered IL-6 binding polypeptide
VDAKYAKEERFAWNEIHKLPNLTIDQMAAFITKLFDDPSQSSELLSEAKKLNDSQAPK

SEQ ID NO: 1049 - protein, 58 aa, ARTIFICIAL SEQUENCE
  Engineered IL-6 binding polypeptide
VDAKYAKEEAKAWFEIHLLPNLTIQQIAAFITKLFDDPSQSSELLSEAKKLNDSQAPK

SEQ ID NO: 1050 - protein, 58 aa, ARTIFICIAL SEQUENCE
  Engineered IL-6 binding polypeptide
VDAKYAKEEREAWTEIHILPNLTIDQMAAFITKLFDDPSQSSELLSEAKKLNDSQAPK

SEQ ID NO: 1051 - protein, 58 aa, ARTIFICIAL SEQUENCE
  Engineered IL-6 binding polypeptide
VDAKYAKEEFEAWNEIHKLPNLTIEQMAAFISKLFDDPSQSSELLSEAKKLNDSQAPK

SEQ ID NO: 1052 - protein, 58 aa, ARTIFICIAL SEQUENCE
  Engineered IL-6 binding polypeptide
VDAKYAKEEKEAWYEIHILPNLTVHQIAAFISKLFDDPSQSSELLSEAKKLNDSQAPK

SEQ ID NO: 1053 - protein, 58 aa, ARTIFICIAL SEQUENCE
  Engineered IL-6 binding polypeptide
VDAKYAKEEYQAWVEIHNLPNLTVDQMAAFITKLFDDPSQSSELLSEAKKLNDSQAPK

SEQ ID NO: 1054 - protein, 58 aa, ARTIFICIAL SEQUENCE
  Engineered IL-6 binding polypeptide
VDAKYAKEEKKAWREIHLLPNLTINQIAAFITKLFDDPSQSSELLSEAKKLNDSQAPK

SEQ ID NO: 1055 - protein, 58 aa, ARTIFICIAL SEQUENCE
  Engineered IL-6 binding polypeptide
VDAKYAKEEQDAWIEIHLLPNLTIDQMAAFITKLFDDPSQSSELLSEAKKLNDSQAPK

SEQ ID NO: 1056 - protein, 58 aa, ARTIFICIAL SEQUENCE
  Engineered IL-6 binding polypeptide
VDAKYAKEEHDAWWEIHALPNLTINQMAAFISKLFDDPSQSSELLSEAKKLNDSQAPK

SEQ ID NO: 1057 - protein, 58 aa, ARTIFICIAL SEQUENCE
  Engineered IL-6 binding polypeptide
VDAKYAKEEYDAWYEIHLLPNLTIQQMAAFISKLFDDPSQSSELLSEAKKLNDSQAPK

SEQ ID NO: 1058 - protein, 58 aa, ARTIFICIAL SEQUENCE
  Engineered IL-6 binding polypeptide
VDAKYAKEEYQAWVEIHILPNLTIQQIAAFITKLFDDPSQSSELLSEAKKLNDSQAPK

SEQ ID NO: 1059 - protein, 58 aa, ARTIFICIAL SEQUENCE
  Engineered IL-6 binding polypeptide
VDAKYAKEESKAWNEIHKLPNLTITQMAAFITKLFDDPSQSSELLSEAKKLNDSQAPK

SEQ ID NO: 1060 - protein, 58 aa, ARTIFICIAL SEQUENCE
  Engineered IL-6 binding polypeptide
VDAKYAKEEYQAWYEIHLLPNLTVEQMAAFITKLFDDPSQSSELLSEAKKLNDSQAPK

SEQ ID NO: 1061 - protein, 58 aa, ARTIFICIAL SEQUENCE
  Engineered IL-6 binding polypeptide
VDAKYAKEEKRAWMEIHLLPNLTVGQMAAFITKLFDDPSQSSELLSEAKKLNDSQAPK

SEQ ID NO: 1062 - protein, 58 aa, ARTIFICIAL SEQUENCE
  Engineered IL-6 binding polypeptide
VDAKYAKEERVAWLEIHILPNLTIGQIAAFITKLFDDPSQSSELLSEAKKLNDSQAPK

SEQ ID NO: 1063 - protein, 58 aa, ARTIFICIAL SEQUENCE
  Engineered IL-6 binding polypeptide
VDAKYAKEEQAAWYEIHLLPNLTIEQMAAFITKLFDDPSQSSELLSEAKKLNDSQAPK

SEQ ID NO: 1064 - protein, 58 aa, ARTIFICIAL SEQUENCE
  Engineered IL-6 binding polypeptide
VDAKYAKEEKDAWYEIHILPNLTVSQIAAFITKLFDDPSQSSELLSEAKKLNDSQAPK

SEQ ID NO: 1065 - protein, 58 aa, ARTIFICIAL SEQUENCE
  Engineered IL-6 binding polypeptide
VDAKYAKEEKKAWYEIHLLPNLTISQMAAFITKLFDDPSQSSELLSEAKKLNDSQAPK

SEQ ID NO: 1066 - protein, 58 aa, ARTIFICIAL SEQUENCE
  Engineered IL-6 binding polypeptide
VDAKYAKEEKKAWYEIHLLPNLTINQMAAFITKLFDDPSQSSELLSEAKKLNDSQAPK

SEQ ID NO: 1067 - protein, 58 aa, ARTIFICIAL SEQUENCE
  Engineered IL-6 binding polypeptide
VDAKYAKEEHKAWTEIHLLPNLTVDQIAAFITKLFDDPSQSSELLSEAKKLNDSQAPK

SEQ ID NO: 1068 - protein, 58 aa, ARTIFICIAL SEQUENCE
  Engineered IL-6 binding polypeptide
VDAKYAKEEAAAWHEIHLLPNLTIDQMAAFITKLFDDPSQSSELLSEAKKLNDSQAPK

SEQ ID NO: 1069 - protein, 58 aa, ARTIFICIAL SEQUENCE
  Engineered IL-6 binding polypeptide
VDAKYAKEERSAWTEIHLLPNLTITQIAAFITKLFDDPSQSSELLSEAKKLNDSQAPK

SEQ ID NO: 1070 - protein, 58 aa, ARTIFICIAL SEQUENCE
  Engineered IL-6 binding polypeptide
VDAKYAKEERLAWQEIHRLPNLTVDQMAAFITKLFDDPSQSSELLSEAKKLNDSQAPK

SEQ ID NO: 1071 - protein, 58 aa, ARTIFICIAL SEQUENCE
  Engineered IL-6 binding polypeptide
VDAKYAKEEKDAWTEIHLLPNLTVEQMAAFISKLFDDPSQSSELLSEAKKLNDSQAPK

SEQ ID NO: 1072 - protein, 58 aa, ARTIFICIAL SEQUENCE
  Engineered IL-6 binding polypeptide
VDAKYAKEEKAAWMEIHNLPNLTIDQMAAFITKLFDDPSQSSELLSEAKKLNDSQAPK

SEQ ID NO: 1073 - protein, 58 aa, ARTIFICIAL SEQUENCE
  Engineered IL-6 binding polypeptide
VDAKYAKEEYEAWVEIHNLPNLTIDQMAAFITKLFDDPSQSSELLSEAKKLNDSQAPK

SEQ ID NO: 1074 - protein, 58 aa, ARTIFICIAL SEQUENCE
  Engineered IL-6 binding polypeptide
VDAKYAKEEAKAWTEIHLLPNLTVNQIAAFITKLFDDPSQSSELLSEAKKLNDSQAPK

SEQ ID NO: 1075 - protein, 58 aa, ARTIFICIAL SEQUENCE
  Engineered IL-6 binding polypeptide
VDAKYAKEEKKAWYEIHILPNLTIHQIAAFITKLFDDPSQSSELLSEAKKLNDSQAPK

SEQ ID NO: 1076 - protein, 58 aa, ARTIFICIAL SEQUENCE
  Engineered IL-6 binding polypeptide
VDAKYAKEEKKAWFEIHLLPNLTVDQMAAFISKLFDDPSQSSELLSEAKKLNDSQAPK

SEQ ID NO: 1077 - protein, 58 aa, ARTIFICIAL SEQUENCE
  Engineered IL-6 binding polypeptide
VDAKYAKEERKAWFEIHSLPNLTIDQMAAFITKLFDDPSQSSELLSEAKKLNDSQAPK

SEQ ID NO: 1078 - protein, 58 aa, ARTIFICIAL SEQUENCE
  Engineered IL-6 binding polypeptide
VDAKYAKEERNAWYEIHLLPNLTVDQMAAFITKLFDDPSQSSELLSEAKKLNDSQAPK

SEQ ID NO: 1079 - protein, 58 aa, ARTIFICIAL SEQUENCE
  Engineered IL-6 binding polypeptide
VDAKYAKEEASAWKEIHLLPNLTIDQVAAFITKLFDDPSQSSELLSEAKKLNDSQAPK

SEQ ID NO: 1080 - protein, 58 aa, ARTIFICIAL SEQUENCE
  Engineered IL-6 binding polypeptide
VDAKYAKEEAAAWKEIHLLPNLTIDQMAAFISKLFDDPSQSSELLSEAKKLNDSQAPK

SEQ ID NO: 1081 - protein, 58 aa, ARTIFICIAL SEQUENCE
  Engineered IL-6 binding polypeptide
VDAKYAKEEAWAWHEIHILPNLTIEQMAAFITKLFDDPSQSSELLSEAKKLNDSQAPK

SEQ ID NO: 1082 - protein, 58 aa, ARTIFICIAL SEQUENCE
  Engineered IL-6 binding polypeptide
VDAKYAKEEKYAWLEIHKLPNLTVDQVAAFITKLFDDPSQSSELLSEAKKLNDSQAPK

SEQ ID NO: 1083 - protein, 58 aa, ARTIFICIAL SEQUENCE
  Engineered IL-6 binding polypeptide
VDAKYAKEERSAWMEIHLLPNLTINQMAAFISKLFDDPSQSSELLSEAKKLNDSQAPK

SEQ ID NO: 1084 - protein, 58 aa, ARTIFICIAL SEQUENCE
  Engineered IL-6 binding polypeptide
VDAKYAKEERMAWNEIHGLPNLTVDQMAAFITKLFDDPSQSSELLSEAKKLNDSQAPK

SEQ ID NO: 1085 - protein, 58 aa, ARTIFICIAL SEQUENCE
  Engineered IL-6 binding polypeptide
VDAKYAKEEAKAWYEIHILPNLTIIQMAAFITKLFDDPSQSSELLSEAKKLNDSQAPK

SEQ ID NO: 1086 - protein, 58 aa, ARTIFICIAL SEQUENCE
  Engineered IL-6 binding polypeptide
VDAKYAKEEKWAWTEIHKLPNLTISQMAAFITKLFDDPSQSSELLSEAKKLNDSQAPK

SEQ ID NO: 1087 - protein, 58 aa, ARTIFICIAL SEQUENCE
  Engineered IL-6 binding polypeptide
VDAKYAKEERMAWTEIHNLPNLTIEQMAAFITKLFDDPSQSSELLSEAKKLNDSQAPK

SEQ ID NO: 1088 - protein, 58 aa, ARTIFICIAL SEQUENCE
  Engineered IL-6 binding polypeptide
VDAKYAKEEEWAWKEIHILPNLTVEQVAAFITKLFDDPSQSSELLSEAKKLNDSQAPK

SEQ ID NO: 1089 - protein, 58 aa, ARTIFICIAL SEQUENCE
  Engineered IL-6 binding polypeptide
VDAKYAKEEKFAWTEIHKLPNLTVDQMAAFITKLFDDPSQSSELLSEAKKLNDSQAPK

SEQ ID NO: 1090 - protein, 58 aa, ARTIFICIAL SEQUENCE
  Engineered IL-6 binding polypeptide
VDAKYAKEEHYAWQEIHKLPNLTIDQMAAFITKLFDDPSQSSELLSEAKKLNDSQAPK

SEQ ID NO: 1091 - protein, 58 aa, ARTIFICIAL SEQUENCE
  Engineered IL-6 binding polypeptide
VDAKYAKEERKAWYEIHILPNLTITQIAAFITKLFDDPSQSSELLSEAKKLNDSQAPK

SEQ ID NO: 1092 - protein, 58 aa, ARTIFICIAL SEQUENCE
  Engineered IL-6 binding polypeptide
VDAKYAKEERYAWTEIHKLPNLTVDQVAAFISKLFDDPSQSSELLSEAKKLNDSQAPK

SEQ ID NO: 1093 - protein, 58 aa, ARTIFICIAL SEQUENCE
  Engineered IL-6 binding polypeptide
VDAKYAKEEKEAWYEIHILPNLTVSQIAAFITKLFDDPSQSSELLSEAKKLNDSQAPK

SEQ ID NO: 1094 - protein, 58 aa, ARTIFICIAL SEQUENCE
  Engineered IL-6 binding polypeptide
VDAKYAKEEYSAWFEIHILPNLTVEQMAAFISKLFDDPSQSSELLSEAKKLNDSQAPK

SEQ ID NO: 1095 - protein, 58 aa, ARTIFICIAL SEQUENCE
  Engineered IL-6 binding polypeptide
VDAKYAKEERMAWNEIHKLPNLTIDQMAAFISKLFDDPSQSSELLSEAKKLNDSQAPK

SEQ ID NO: 1096 - protein, 58 aa, ARTIFICIAL SEQUENCE
  Engineered IL-6 binding polypeptide
VDAKYAKEEAKAWTEIHLLPNLTVNQVAAFITKLFDDPSQSSELLSEAKKLNDSQAPK

SEQ ID NO: 1097 - protein, 58 aa, ARTIFICIAL SEQUENCE
  Engineered IL-6 binding polypeptide
VDAKYAKEEKFAWREIHLLPNLTIEQMAAFISKLFDDPSQSSELLSEAKKLNDSQAPK

SEQ ID NO: 1098 - protein, 58 aa, ARTIFICIAL SEQUENCE
  Engineered IL-6 binding polypeptide
VDAKYAKEEANAWHEIHLLPNLTIDQMAAFITKLFDDPSQSSELLSEAKKLNDSQAPK

SEQ ID NO: 1099 - protein, 58 aa, ARTIFICIAL SEQUENCE
  Engineered IL-6 binding polypeptide
VDAKYAKEEKHAWNEIHRLPNLTVEQMAAFITKLFDDPSQSSELLSEAKKLNDSQAPK

SEQ ID NO: 1100 - protein, 58 aa, ARTIFICIAL SEQUENCE
  Engineered IL-6 binding polypeptide
VDAKYAKEEHMAWTEIHALPNLTVDQMAAFISKLFDDPSQSSELLSEAKKLNDSQAPK

SEQ ID NO: 1101 - protein, 58 aa, ARTIFICIAL SEQUENCE
  Engineered IL-6 binding polypeptide
VDAKYAKEEYEAWMEIHNLPNLTVDQMAAFITKLFDDPSQSSELLSEAKKLNDSQAPK

SEQ ID NO: 1102 - protein, 58 aa, ARTIFICIAL SEQUENCE
  Engineered IL-6 binding polypeptide
VDAKYAKEERAAWYEIHILPNLTVEQMAAFITKLFDDPSQSSELLSEAKKLNDSQAPK

SEQ ID NO: 1103 - protein, 58 aa, ARTIFICIAL SEQUENCE
  Engineered IL-6 binding polypeptide
VDAKYAKEEKNAWYEIHLLPNLTVVQMAAFITKLFDDPSQSSELLSEAKKLNDSQAPK

SEQ ID NO: 1104 - protein, 58 aa, ARTIFICIAL SEQUENCE
  Engineered IL-6 binding polypeptide
VDAKYAKEEQIAWYEIHILPNLTVDQVAAFISKLFDDPSQSSELLSEAKKLNDSQAPK

SEQ ID NO: 1105 - protein, 58 aa, ARTIFICIAL SEQUENCE
  Engineered IL-6 binding polypeptide
VDAKYAKEEYYAWTEIHRLPNLTVDQMAAFITKLFDDPSQSSELLSEAKKLNDSQAPK

SEQ ID NO: 1106 - protein, 58 aa, ARTIFICIAL SEQUENCE
  Engineered IL-6 binding polypeptide
VDAKYAKEEADAWFEIHILPNLTVDQIAAFITKLFDDPSQSSELLSEAKKLNDSQAPK

SEQ ID NO: 1107 - protein, 58 aa, ARTIFICIAL SEQUENCE
  Engineered IL-6 binding polypeptide
VDAKYAKEEKEAWMEIHKLPNLTVDQMAAFITKLFDDPSQSSELLSEAKKLNDSQAPK

SEQ ID NO: 1108 - protein, 58 aa, ARTIFICIAL SEQUENCE
  Engineered IL-6 binding polypeptide
VDAKYAKEEYLAWIEIHALPNLTVSQMAAFITKLFDDPSQSSELLSEAKKLNDSQAPK

SEQ ID NO: 1109 - protein, 58 aa, ARTIFICIAL SEQUENCE
  Engineered IL-6 binding polypeptide
VDAKYAKEEAFAWWEIHKLPNLTINQMAAFITKLFDDPSQSSELLSEAKKLNDSQAPK

SEQ ID NO: 1110 - protein, 58 aa, ARTIFICIAL SEQUENCE
  Engineered IL-6 binding polypeptide
VDAKYAKEEYNAWFEIHILPNLTISQMAAFITKLFDDPSQSSELLSEAKKLNDSQAPK

SEQ ID NO: 1111 - protein, 58 aa, ARTIFICIAL SEQUENCE
  Engineered IL-6 binding polypeptide
VDAKYAKEEKEAWREIHILPNLTVDQMAAFISKLFDDPSQSSELLSEAKKLNDSQAPK

SEQ ID NO: 1112 - protein, 58 aa, ARTIFICIAL SEQUENCE
  Engineered IL-6 binding polypeptide
VDAKYAKEEKKAWHEIHILPNLTIGQMAAFISKLFDDPSQSSELLSEAKKLNDSQAPK

SEQ ID NO: 1113 - protein, 58 aa, ARTIFICIAL SEQUENCE
  Engineered IL-6 binding polypeptide
VDAKYAKEEYHAWTEIHKLPNLTINQMAAFISKLFDDPSQSSELLSEAKKLNDSQAPK

SEQ ID NO: 1114 - protein, 58 aa, ARTIFICIAL SEQUENCE
  Engineered IL-6 binding polypeptide
VDAKYAKEEFSAWYEIHLLPNLTVDQMAAFITKLFDDPSQSSELLSEAKKLNDSQAPK

SEQ ID NO: 1115 - protein, 58 aa, ARTIFICIAL SEQUENCE
  Engineered IL-6 binding polypeptide
VDAKYAKEERAAWWEIHTLPNLTVDQMAAFISKLFDDPSQSSELLSEAKKLNDSQAPK

SEQ ID NO: 1116 - protein, 58 aa, ARTIFICIAL SEQUENCE
  Engineered IL-6 binding polypeptide
VDAKYAKEEYEAWVEIHLLPNLTIDQMAAFISKLFDDPSQSSELLSEAKKLNDSQAPK

SEQ ID NO: 1117 - protein, 58 aa, ARTIFICIAL SEQUENCE
  Engineered IL-6 binding polypeptide
VDAKYAKEEAEAWVEIHLLPNLTVNQMAAFITKLFDDPSQSSELLSEAKKLNDSQAPK

SEQ ID NO: 1118 - protein, 58 aa, ARTIFICIAL SEQUENCE
  Engineered IL-6 binding polypeptide
VDAKYAKEEAKAWHEIHILPNLTITQIAAFITKLFDDPSQSSELLSEAKKLNDSQAPK

SEQ ID NO: 1119 - protein, 58 aa, ARTIFICIAL SEQUENCE
  Engineered IL-6 binding polypeptide
VDAKYAKEEFYAWNEIHKLPNLTVNQMAAFITKLFDDPSQSSELLSEAKKLNDSQAPK

SEQ ID NO: 1120 - protein, 58 aa, ARTIFICIAL SEQUENCE
  Engineered IL-6 binding polypeptide
VDAKYAKEEYLAWTEIHLLPNLTIEQMAAFITKLFDDPSQSSELLSEAKKLNDSQAPK

SEQ ID NO: 1121 - protein, 58 aa, ARTIFICIAL SEQUENCE
  Engineered IL-6 binding polypeptide
VDAKYAKEEHAAWREIHALPNLTVDQMAAFISKLFDDPSQSSELLSEAKKLNDSQAPK

SEQ ID NO: 1122 - protein, 58 aa, ARTIFICIAL SEQUENCE
  Engineered IL-6 binding polypeptide
VDAKYAKEEQRAWMEIHLLPNLTIEQIAAFISKLFDDPSQSSELLSEAKKLNDSQAPK

SEQ ID NO: 1123 - protein, 58 aa, ARTIFICIAL SEQUENCE
  Engineered IL-6 binding polypeptide
VDAKYAKEERDAWTEIHKLPNLTVDQMAAFITKLFDDPSQSSELLSEAKKLNDSQAPK

SEQ ID NO: 1124 - protein, 58 aa, ARTIFICIAL SEQUENCE
  Engineered IL-6 binding polypeptide
VDAKYAKEERDAWFEIHRLPNLTVDQMAAFITKLFDDPSQSSELLSEAKKLNDSQAPK

SEQ ID NO: 1125 - protein, 58 aa, ARTIFICIAL SEQUENCE
  Engineered IL-6 binding polypeptide
VDAKYAKEESYAWTEIHKLPNLTIDQMAAFITKLFDDPSQSSELLSEAKKLNDSQAPK

SEQ ID NO: 1126 - protein, 58 aa, ARTIFICIAL SEQUENCE
  Engineered IL-6 binding polypeptide
VDAKYAKEEKFAWKEIHILPNLTIDQIAAFITKLFDDPSQSSELLSEAKKLNDSQAPK

SEQ ID NO: 1127 - protein, 58 aa, ARTIFICIAL SEQUENCE
  Engineered IL-6 binding polypeptide
VDAKYAKEEHRAWMEIHQLPNLTVDQMAAFITKLFDDPSQSSELLSEAKKLNDSQAPK

SEQ ID NO: 1128 - protein, 58 aa, ARTIFICIAL SEQUENCE
  Engineered IL-6 binding polypeptide
VDAKYAKEERTAWFEIHKLPNLTVDQMAAFITKLFDDPSQSSELLSEAKKLNDSQAPK

SEQ ID NO: 1129 - protein, 58 aa, ARTIFICIAL SEQUENCE
  Engineered IL-6 binding polypeptide
VDAKYAKEERYAWWEIHKLPNLTVEQVAAFITKLFDDPSQSSELLSEAKKLNDSQAPK

SEQ ID NO: 1130 - protein, 58 aa, ARTIFICIAL SEQUENCE
  Engineered IL-6 binding polypeptide
VDAKYAKEEEEAWNEIHRLPNLTVVQMAAFISKLFDDPSQSSELLSEAKKLNDSQAPK

SEQ ID NO: 1131 - protein, 58 aa, ARTIFICIAL SEQUENCE
  Engineered IL-6 binding polypeptide
VDAKYAKEEYEAWVEIHILPNLTVEQMAAFITKLFDDPSQSSELLSEAKKLNDSQAPK

SEQ ID NO: 1132 - protein, 58 aa, ARTIFICIAL SEQUENCE
  Engineered IL-6 binding polypeptide
VDAKYAKEEYHAWTEIHLLPNLTIEQMAAFITKLFDDPSQSSELLSEAKKLNDSQAPK

SEQ ID NO: 1133 - protein, 58 aa, ARTIFICIAL SEQUENCE
  Engineered IL-6 binding polypeptide
VDAKYAKEEYNAWYEIHVLPNLTIDQIAAFITKLFDDPSQSSELLSEAKKLNDSQAPK

SEQ ID NO: 1134 - protein, 58 aa, ARTIFICIAL SEQUENCE
  Engineered IL-6 binding polypeptide
VDAKYAKEERKAWYEIHILPNLTVHQIAAFITKLFDDPSQSSELLSEAKKLNDSQAPK

SEQ ID NO: 1135 - protein, 58 aa, ARTIFICIAL SEQUENCE
  Engineered IL-6 binding polypeptide
VDAKYAKEEWAAWIEIHSLPNLTVDQMAAFITKLFDDPSQSSELLSEAKKLNDSQAPK

SEQ ID NO: 1136 - protein, 58 aa, ARTIFICIAL SEQUENCE
  Engineered IL-6 binding polypeptide
VDAKYAKEEAIAWSEIHSLPNLTVGQMAAFITKLFDDPSQSSELLSEAKKLNDSQAPK

SEQ ID NO: 1137 - protein, 58 aa, ARTIFICIAL SEQUENCE
  Engineered IL-6 binding polypeptide
VDAKYAKEEKYAWTEIHILPNLTIDQMAAFISKLFDDPSQSSELLSEAKKLNDSQAPK

SEQ ID NO: 1138 - protein, 58 aa, ARTIFICIAL SEQUENCE
  Engineered IL-6 binding polypeptide
VDAKYAKEEHTAWREIHLLPNLTISQMAAFITKLFDDPSQSSELLSEAKKLNDSQAPK

SEQ ID NO: 1139 - protein, 58 aa, ARTIFICIAL SEQUENCE
  Engineered IL-6 binding polypeptide
VDAKYAKEEYTAWYEIHLLPNLTIEQMAAFISKLFDDPSQSSELLSEAKKLNDSQAPK

SEQ ID NO: 1140 - protein, 58 aa, ARTIFICIAL SEQUENCE
  Engineered IL-6 binding polypeptide
VDAKYAKEEYEAWYEIHILPNLTVRQMAAFISKLFDDPSQSSELLSEAKKLNDSQAPK

SEQ ID NO: 1141 - protein, 58 aa, ARTIFICIAL SEQUENCE
  Engineered IL-6 binding polypeptide
VDAKYAKEEKHAWTEIHLLPNLTISQMAAFITKLFDDPSQSSELLSEAKKLNDSQAPK

SEQ ID NO: 1142 - protein, 58 aa, ARTIFICIAL SEQUENCE
  Engineered IL-6 binding polypeptide
VDAKYAKEEYTAWYEIHVLPNLTIRQMAAFITKLFDDPSQSSELLSEAKKLNDSQAPK

SEQ ID NO: 1143 - protein, 58 aa, ARTIFICIAL SEQUENCE
  Engineered IL-6 binding polypeptide
VDAKYAKEEQRAWYEIHTLPNLTIDQMAAFITKLFDDPSQSSELLSEAKKLNDSQAPK

SEQ ID NO: 1144 - protein, 58 aa, ARTIFICIAL SEQUENCE
  Engineered IL-6 binding polypeptide
VDAKYAKEEAVAWKEIHLLPNLTIDQIAAFISKLFDDPSQSSELLSEAKKLNDSQAPK

SEQ ID NO: 1145 - protein, 58 aa, ARTIFICIAL SEQUENCE
  Engineered IL-6 binding polypeptide
VDAKYAKEEYRAWMEIHALPNLTIVQIAAFITKLFDDPSQSSELLSEAKKLNDSQAPK

SEQ ID NO: 1146 - protein, 58 aa, ARTIFICIAL SEQUENCE
  Engineered IL-6 binding polypeptide
VDAKYAKEERSAWNEIHKLPNLTIDQMAAFITKLFDDPSQSSELLSEAKKLNDSQAPK

SEQ ID NO: 1147 - protein, 58 aa, ARTIFICIAL SEQUENCE
  Engineered IL-6 binding polypeptide
VDAKYAKEEAEAWFEIHILPNLTVGQIAAFITKLFDDPSQSSELLSEAKKLNDSQAPK

SEQ ID NO: 1148 - protein, 58 aa, ARTIFICIAL SEQUENCE
  Engineered IL-6 binding polypeptide
VDAKYAKEEKMAWNEIHKLPNLTVEQIAAFITKLFDDPSQSSELLSEAKKLNDSQAPK

SEQ ID NO: 1149 - protein, 58 aa, ARTIFICIAL SEQUENCE
  Engineered IL-6 binding polypeptide
VDAKYAKEERTAWMEIHKLPNLTIDQMAAFISKLFDDPSQSSELLSEAKKLNDSQAPK

SEQ ID NO: 1150 - protein, 58 aa, ARTIFICIAL SEQUENCE
  Engineered IL-6 binding polypeptide
VDAKYAKEEYEAWYEIHALPNLTLHQMAAFISKLFDDPSQSSELLSEAKKLNDSQAPK

SEQ ID NO: 1151 - protein, 58 aa, ARTIFICIAL SEQUENCE
  Engineered IL-6 binding polypeptide
VDAKYAKEEYDAWFEIHVLPNLTVNQMAAFITKLFDDPSQSSELLSEAKKLNDSQAPK

SEQ ID NO: 1152 - protein, 58 aa, ARTIFICIAL SEQUENCE
  Engineered IL-6 binding polypeptide
VDAKYAKEESLAWMEIHKLPNLTVDQVAAFITKLFDDPSQSSELLSEAKKLNDSQAPK

SEQ ID NO: 1153 - protein, 58 aa, ARTIFICIAL SEQUENCE
  Engineered IL-6 binding polypeptide
VDAKYAKEERNAWWEIHALPNLTVNQMAAFITKLFDDPSQSSELLSEAKKLNDSQAPK

SEQ ID NO: 1154 - protein, 58 aa, ARTIFICIAL SEQUENCE
  Engineered IL-6 binding polypeptide
VDAKYAKEEKKAWKEIHLLPNLTVNQMAAFISKLFDDPSQSSELLSEAKKLNDSQAPK

SEQ ID NO: 1155 - protein, 58 aa, ARTIFICIAL SEQUENCE
  Engineered IL-6 binding polypeptide
VDAKYAKEEKYAWTEIHNLPNLTILQMAAFITKLFDDPSQSSELLSEAKKLNDSQAPK

SEQ ID NO: 1156 - protein, 58 aa, ARTIFICIAL SEQUENCE
  Engineered IL-6 binding polypeptide
VDAKYAKEEYKAWVEIHLLPNLTVDQMAAFISKLFDDPSQSSELLSEAKKLNDSQAPK

SEQ ID NO: 1157 - protein, 58 aa, ARTIFICIAL SEQUENCE
  Engineered IL-6 binding polypeptide
VDAKYAKEEHAAWLEIHLLPNLTVSQIAAFITKLFDDPSQSSELLSEAKKLNDSQAPK

SEQ ID NO: 1158 - protein, 58 aa, ARTIFICIAL SEQUENCE
  Engineered IL-6 binding polypeptide
VDAKYAKEEYHAWWEIHALPNLTVEQMAAFITKLFDDPSQSSELLSEAKKLNDSQAPK

SEQ ID NO: 1159 - protein, 58 aa, ARTIFICIAL SEQUENCE
  Engineered IL-6 binding polypeptide
VDAKYAKEERYAWNEIHRLPNLTVDQMAAFITKLFDDPSQSSELLSEAKKLNDSQAPK

SEQ ID NO: 1160 - protein, 58 aa, ARTIFICIAL SEQUENCE
  Engineered IL-6 binding polypeptide
VDAKYAKEEAQAWMEIHLLPNLTIAQMAAFITKLFDDPSQSSELLSEAKKLNDSQAPK

SEQ ID NO: 1161 - protein, 58 aa, ARTIFICIAL SEQUENCE
  Engineered IL-6 binding polypeptide
VDAKYAKEEREAWYEIHILPNLTVNQMAAFITKLFDDPSQSSELLSEAKKLNDSQAPK

SEQ ID NO: 1162 - protein, 58 aa, ARTIFICIAL SEQUENCE
  Engineered IL-6 binding polypeptide
VDAKYAKEEAYAWNEIHKLPNLTVEQMAAFISKLFDDPSQSSELLSEAKKLNDSQAPK

SEQ ID NO: 1163 - protein, 58 aa, ARTIFICIAL SEQUENCE
  Engineered IL-6 binding polypeptide
VDAKYAKEEYDAWAEIHRLPNLTISQMAAFITKLFDDPSQSSELLSEAKKLNDSQAPK

SEQ ID NO: 1164 - protein, 58 aa, ARTIFICIAL SEQUENCE
  Engineered IL-6 binding polypeptide
VDAKYAKEEYHAWTEIHILPNLTINQIAAFITKLFDDPSQSSELLSEAKKLNDSQAPK

SEQ ID NO: 1165 - protein, 58 aa, ARTIFICIAL SEQUENCE
  Engineered IL-6 binding polypeptide
VDAKYAKEERQAWFEIHILPNLTVGQMAAFISKLFDDPSQSSELLSEAKKLNDSQAPK

SEQ ID NO: 1166 - protein, 58 aa, ARTIFICIAL SEQUENCE
  Engineered IL-6 binding polypeptide
VDAKYAKEEAEAWFEIHILPNLTVDQIAAFITKLFDDPSQSSELLSEAKKLNDSQAPK

SEQ ID NO: 1167 - protein, 58 aa, ARTIFICIAL SEQUENCE
  Engineered IL-6 binding polypeptide
VDAKYAKEEKKAWYEIHILPNLTVYQMAAFITKLFDDPSQSSELLSEAKKLNDSQAPK

SEQ ID NO: 1168 - protein, 58 aa, ARTIFICIAL SEQUENCE
  Engineered IL-6 binding polypeptide
VDAKYAKEEKAAWHEIHILPNLTVHQMAAFITKLFDDPSQSSELLSEAKKLNDSQAPK

SEQ ID NO: 1169 - protein, 58 aa, ARTIFICIAL SEQUENCE
  Engineered IL-6 binding polypeptide
VDAKYAKEEAQAWNEIHKLPNLTVEQMAAFISKLFDDPSQSSELLSEAKKLNDSQAPK

SEQ ID NO: 1170 - protein, 58 aa, ARTIFICIAL SEQUENCE
  Engineered IL-6 binding polypeptide
VDAKYAKEEYEAWYEIHILPNLTVHQIAAFITKLFDDPSQSSELLSEAKKLNDSQAPK

SEQ ID NO: 1171 - protein, 58 aa, ARTIFICIAL SEQUENCE
  Engineered IL-6 binding polypeptide
VDAKYAKEEYEAWMEIHLLPNLTVHQMAAFITKLFDDPSQSSELLSEAKKLNDSQAPK

SEQ ID NO: 1172 - protein, 58 aa, ARTIFICIAL SEQUENCE
  Engineered IL-6 binding polypeptide
VDAKYAKEEYDAWFEIHVLPNLTINQMAAFITKLFDDPSQSSELLSEAKKLNDSQAPK

SEQ ID NO: 1173 - protein, 58 aa, ARTIFICIAL SEQUENCE
  Engineered IL-6 binding polypeptide
VDAKYAKEEKRAWNEIHQLPNLTIEQIAAFITKLFDDPSQSSELLSEAKKLNDSQAPK

SEQ ID NO: 1174 - protein, 58 aa, ARTIFICIAL SEQUENCE
  Engineered IL-6 binding polypeptide
VDAKYAKEEARAWWEIHLLPNLTVDQIAAFITKLFDDPSQSSELLSEAKKLNDSQAPK

SEQ ID NO: 1175 - protein, 58 aa, ARTIFICIAL SEQUENCE
  Engineered IL-6 binding polypeptide
VDAKYAKEEKHAWREIHILPNLTVDQIAAFITKLFDDPSQSSELLSEAKKLNDSQAPK

SEQ ID NO: 1176 - protein, 58 aa, ARTIFICIAL SEQUENCE
  Engineered IL-6 binding polypeptide
VDAKYAKEESRAWTEIHLLPNLTVDQMAAFITKLFDDPSQSSELLSEAKKLNDSQAPK

SEQ ID NO: 1177 - protein, 58 aa, ARTIFICIAL SEQUENCE
  Engineered IL-6 binding polypeptide
VDAKYAKEEAEAWKEIHLLPNLTIGQIAAFITKLFDDPSQSSELLSEAKKLNDSQAPK

SEQ ID NO: 1178 - protein, 58 aa, ARTIFICIAL SEQUENCE
  Engineered IL-6 binding polypeptide
VDAKYAKEEADAWKEIHLLPNLTIEQMAAFITKLFDDPSQSSELLSEAKKLNDSQAPK

SEQ ID NO: 1179 - protein, 58 aa, ARTIFICIAL SEQUENCE
  Engineered IL-6 binding polypeptide
VDAKYAKEEYQAWMEIHILPNLTIEQMAAFITKLFDDPSQSSELLSEAKKLNDSQAPK

SEQ ID NO: 1180 - protein, 58 aa, ARTIFICIAL SEQUENCE
  Engineered IL-6 binding polypeptide
VDAKYAKEEAHAWWEIHKLPNLTVNQMAAFITKLFDDPSQSSELLSEAKKLNDSQAPK

SEQ ID NO: 1181 - protein, 58 aa, ARTIFICIAL SEQUENCE
  Engineered IL-6 binding polypeptide
VDAKYAKEEWYAWNEIHKLPNLTVDQMAAFISKLFDDPSQSSELLSEAKKLNDSQAPK

SEQ ID NO: 1182 - protein, 58 aa, ARTIFICIAL SEQUENCE
  Engineered IL-6 binding polypeptide
VDAKYAKEEKKAWNEIHNLPNLTVDQMAAFITKLFDDPSQSSELLSEAKKLNDSQAPK

SEQ ID NO: 1183 - protein, 58 aa, ARTIFICIAL SEQUENCE
  Engineered IL-6 binding polypeptide
VDAKYAKEEAAAWMEIHGLPNLTVDQVAAFISKLFDDPSQSSELLSEAKKLNDSQAPK

SEQ ID NO: 1184 - protein, 58 aa, ARTIFICIAL SEQUENCE
  Engineered IL-6 binding polypeptide
VDAKYAKEEKFAWREIHILPNLTVEQMAAFITKLFDDPSQSSELLSEAKKLNDSQAPK

SEQ ID NO: 1185 - protein, 58 aa, ARTIFICIAL SEQUENCE
  Engineered IL-6 binding polypeptide
VDAKYAKEEYHAWTEIHQLPNLTIDQMAAFISKLFDDPSQSSELLSEAKKLNDSQAPK

SEQ ID NO: 1186 - protein, 58 aa, ARTIFICIAL SEQUENCE
  Engineered IL-6 binding polypeptide
VDAKYAKEEAMAWNEIHRLPNLTVNQMAAFITKLFDDPSQSSELLSEAKKLNDSQAPK

SEQ ID NO: 1187 - protein, 58 aa, ARTIFICIAL SEQUENCE
  Engineered IL-6 binding polypeptide
VDAKYAKEEQKAWREIHILPNLTVNQMAAFISKLFDDPSQSSELLSEAKKLNDSQAPK

SEQ ID NO: 1188 - protein, 58 aa, ARTIFICIAL SEQUENCE
  Engineered IL-6 binding polypeptide
VDAKYAKEEFAAWLEIHKLPNLTIDQMAAFITKLFDDPSQSSELLSEAKKLNDSQAPK

SEQ ID NO: 1189 - protein, 58 aa, ARTIFICIAL SEQUENCE
  Engineered IL-6 binding polypeptide
VDAKYAKEEAYAWAEIHKLPNLTVNQMAAFITKLFDDPSQSSELLSEAKKLNDSQAPK

SEQ ID NO: 1190 - protein, 58 aa, ARTIFICIAL SEQUENCE
  Engineered IL-6 binding polypeptide
VDAKYAKEEKDAWYEIHILPNLTVRQMAAFISKLFDDPSQSSELLSEAKKLNDSQAPK

SEQ ID NO: 1191 - protein, 58 aa, ARTIFICIAL SEQUENCE
  Engineered IL-6 binding polypeptide
VDAKYAKEEKDAWMEIHLLPNLTVSQIAAFITKLFDDPSQSSELLSEAKKLNDSQAPK

SEQ ID NO: 1192 - protein, 58 aa, ARTIFICIAL SEQUENCE
  Engineered IL-6 binding polypeptide
VDAKYAKEEKEAWTEIHKLPNLTINQMAAFISKLFDDPSQSSELLSEAKKLNDSQAPK

SEQ ID NO: 1193 - protein, 58 aa, ARTIFICIAL SEQUENCE
  Engineered IL-6 binding polypeptide
VDAKYAKEEKDAWREIHILPNLTVDQMAAFISKLFDDPSQSSELLSEAKKLNDSQAPK

SEQ ID NO: 1194 - protein, 58 aa, ARTIFICIAL SEQUENCE
  Engineered IL-6 binding polypeptide
VDAKYAKEEYRAWTEIHLLPNLTIEQMAAFISKLFDDPSQSSELLSEAKKLNDSQAPK

SEQ ID NO: 1195 - protein, 58 aa, ARTIFICIAL SEQUENCE
  Engineered IL-6 binding polypeptide
VDAKYAKEEKFAWHEIHILPNLTVHQMAAFITKLFDDPSQSSELLSEAKKLNDSQAPK

SEQ ID NO: 1196 - protein, 58 aa, ARTIFICIAL SEQUENCE
  Engineered IL-6 binding polypeptide
VDAKYAKEEWEAWLEIHALPNLTVEQMAAFITKLFDDPSQSSELLSEAKKLNDSQAPK

SEQ ID NO: 1197 - protein, 58 aa, ARTIFICIAL SEQUENCE
  Engineered IL-6 binding polypeptide
VDAKYAKEEAAAWQEIHLLPNLTVGQIAAFITKLFDDPSQSSELLSEAKKLNDSQAPK

SEQ ID NO: 1198 - protein, 58 aa, ARTIFICIAL SEQUENCE
  Engineered IL-6 binding polypeptide
VDAKYAKEEKVAWKEIHILPNLTVNQIAAFISKLFDDPSQSSELLSEAKKLNDSQAPK

SEQ ID NO: 1199 - protein, 58 aa, ARTIFICIAL SEQUENCE
  Engineered IL-6 binding polypeptide
VDAKYAKEERVAWQEIHLLPNLTIEQMAAFITKLFDDPSQSSELLSEAKKLNDSQAPK

SEQ ID NO: 1200 - protein, 58 aa, ARTIFICIAL SEQUENCE
  Engineered IL-6 binding polypeptide
VDAKYAKEEYEAWLEIHLLPNLTIDQMAAFITKLFDDPSQSSELLSEAKKLNDSQAPK

SEQ ID NO: 1201 - protein, 58 aa, ARTIFICIAL SEQUENCE
  Engineered IL-6 binding polypeptide
VDAKYAKEEAEAWFEIHNLPNLTIDQMAAFITKLFDDPSQSSELLSEAKKLNDSQAPK

SEQ ID NO: 1202 - protein, 58 aa, ARTIFICIAL SEQUENCE
  Engineered IL-6 binding polypeptide
VDAKYAKEEKYAWWEIHKLPNLTVRQMAAFITKLFDDPSQSSELLSEAKKLNDSQAPK

SEQ ID NO: 1203 - protein, 58 aa, ARTIFICIAL SEQUENCE
  Engineered IL-6 binding polypeptide
VDAKYAKEEYDAWHEIHVLPNLTVSQIAAFISKLFDDPSQSSELLSEAKKLNDSQAPK

SEQ ID NO: 1204 - protein, 58 aa, ARTIFICIAL SEQUENCE
  Engineered IL-6 binding polypeptide
VDAKYAKEEAAAWREIHLLPNLTVDQMAAFITKLFDDPSQSSELLSEAKKLNDSQAPK

SEQ ID NO: 1205 - protein, 58 aa, ARTIFICIAL SEQUENCE
  Engineered IL-6 binding polypeptide
VDAKYAKEEKHAWNEIHKLPNLTVKQVAAFISKLFDDPSQSSELLSEAKKLNDSQAPK

SEQ ID NO: 1206 - protein, 58 aa, ARTIFICIAL SEQUENCE
  Engineered IL-6 binding polypeptide
VDAKYAKEEYDAWTEIHLLPNLTIAQIAAFITKLFDDPSQSSELLSEAKKLNDSQAPK

SEQ ID NO: 1207 - protein, 58 aa, ARTIFICIAL SEQUENCE
  Engineered IL-6 binding polypeptide
VDAKYAKEERKAWHEIHILPNLTVDQMAAFITKLFDDPSQSSELLSEAKKLNDSQAPK

SEQ ID NO: 1208 - protein, 58 aa, ARTIFICIAL SEQUENCE
  Engineered IL-6 binding polypeptide
VDAKYAKEEHDAWHEIHLLPNLTVDQIAAFITKLFDDPSQSSELLSEAKKLNDSQAPK

SEQ ID NO: 1209 - protein, 58 aa, ARTIFICIAL SEQUENCE
  Engineered IL-6 binding polypeptide
VDAKYAKEEYAAWNEIHKLPNLTIIQMAAFITKLFDDPSQSSELLSEAKKLNDSQAPK

SEQ ID NO: 1210 - protein, 58 aa, ARTIFICIAL SEQUENCE
  Engineered IL-6 binding polypeptide
VDAKYAKEEYEAWMEIHLLPNLTIEQMAAFISKLFDDPSQSSELLSEAKKLNDSQAPK

SEQ ID NO: 1211 - protein, 58 aa, ARTIFICIAL SEQUENCE
  Engineered IL-6 binding polypeptide
VDAKYAKEEKHAWIEIHALPNLTIDQMAAFISKLFDDPSQSSELLSEAKKLNDSQAPK

SEQ ID NO: 1212 - protein, 58 aa, ARTIFICIAL SEQUENCE
  Engineered IL-6 binding polypeptide
VDAKYAKEEKYAWHEIHILPNLTVDQVAAFITKLFDDPSQSSELLSEAKKLNDSQAPK

SEQ ID NO: 1213 - protein, 58 aa, ARTIFICIAL SEQUENCE
  Engineered IL-6 binding polypeptide
VDAKYAKEEKDAWHEIHILPNLTVDQMAAFITKLFDDPSQSSELLSEAKKLNDSQAPK

SEQ ID NO: 1214 - protein, 58 aa, ARTIFICIAL SEQUENCE
  Engineered IL-6 binding polypeptide
VDAKYAKEEYHAWMEIHILPNLTIEQIAAFITKLFDDPSQSSELLSEAKKLNDSQAPK

SEQ ID NO: 1215 - protein, 58 aa, ARTIFICIAL SEQUENCE
  Engineered IL-6 binding polypeptide
VDAKYAKEEYRAWHEIHILPNLTIQQMAAFITKLFDDPSQSSELLSEAKKLNDSQAPK

SEQ ID NO: 1216 - protein, 58 aa, ARTIFICIAL SEQUENCE
  Engineered IL-6 binding polypeptide
VDAKYAKEEKFAWHEIHILPNLTVQQMAAFITKLFDDPSQSSELLSEAKKLNDSQAPK

SEQ ID NO: 1217 - protein, 58 aa, ARTIFICIAL SEQUENCE
  Engineered IL-6 binding polypeptide
VDAKYAKEEKHAWTEIHLLPNLTVNQMAAFISKLFDDPSQSSELLSEAKKLNDSQAPK

SEQ ID NO: 1218 - protein, 58 aa, ARTIFICIAL SEQUENCE
  Engineered IL-6 binding polypeptide
VDAKYAKEEEFAWREIHILPNLTISQIAAFITKLFDDPSQSSELLSEAKKLNDSQAPK

SEQ ID NO: 1219 - protein, 58 aa, ARTIFICIAL SEQUENCE
  Engineered IL-6 binding polypeptide
VDAKYAKEEKMAWKEIHVLPNLTVDQMAAFITKLFDDPSQSSELLSEAKKLNDSQAPK

SEQ ID NO: 1220 - protein, 58 aa, ARTIFICIAL SEQUENCE
  Engineered IL-6 binding polypeptide
VDAKYAKEEYAAWHEIHVLPNLTIGQMAAFITKLFDDPSQSSELLSEAKKLNDSQAPK

SEQ ID NO: 1221 - protein, 58 aa, ARTIFICIAL SEQUENCE
  Engineered IL-6 binding polypeptide
VDAKYAKEEQYAWQEIHKLPNLTVEQMAAFITKLFDDPSQSSELLSEAKKLNDSQAPK

SEQ ID NO: 1222 - protein, 58 aa, ARTIFICIAL SEQUENCE
  Engineered IL-6 binding polypeptide
VDAKYAKEEWEAWNEIHSLPNLTIDQIAAFITKLFDDPSQSSELLSEAKKLNDSQAPK

SEQ ID NO: 1223 - protein, 58 aa, ARTIFICIAL SEQUENCE
  Engineered IL-6 binding polypeptide
VDAKYAKEEKMAWKEIHLLPNLTVEQMAAFITKLFDDPSQSSELLSEAKKLNDSQAPK

SEQ ID NO: 1224 - protein, 58 aa, ARTIFICIAL SEQUENCE
  Engineered IL-6 binding polypeptide
VDAKYAKEEAHAWREIHNLPNLTIEQMAAFISKLFDDPSQSSELLSEAKKLNDSQAPK

SEQ ID NO: 1225 - protein, 58 aa, ARTIFICIAL SEQUENCE
  Engineered IL-6 binding polypeptide
VDAKYAKEERRAWTEIHILPNLTVDQIAAFISKLFDDPSQSSELLSEAKKLNDSQAPK

SEQ ID NO: 1226 - protein, 58 aa, ARTIFICIAL SEQUENCE
  Engineered IL-6 binding polypeptide
VDAKYAKEEYEAWMEIHLLPNLTINQIAAFITKLFDDPSQSSELLSEAKKLNDSQAPK

SEQ ID NO: 1227 - protein, 58 aa, ARTIFICIAL SEQUENCE
  Engineered IL-6 binding polypeptide
VDAKYAKEEKHAWMEIHALPNLTIDQMAAFITKLFDDPSQSSELLSEAKKLNDSQAPK

SEQ ID NO: 1228 - protein, 58 aa, ARTIFICIAL SEQUENCE
  Engineered IL-6 binding polypeptide
VDAKYAKEEHQAWHEIHILPNLTIQQMAAFITKLFDDPSQSSELLSEAKKLNDSQAPK

SEQ ID NO: 1229 - protein, 58 aa, ARTIFICIAL SEQUENCE
  Engineered IL-6 binding polypeptide
VDAKYAKEEYYAWREIHLLPNLTVDQMAAFITKLFDDPSQSSELLSEAKKLNDSQAPK

SEQ ID NO: 1230 - protein, 58 aa, ARTIFICIAL SEQUENCE
  Engineered IL-6 binding polypeptide
VDAKYAKEEQEAWMEIHKLPNLTIDQVAAFITKLFDDPSQSSELLSEAKKLNDSQAPK

SEQ ID NO: 1231 - protein, 58 aa, ARTIFICIAL SEQUENCE
  Engineered IL-6 binding polypeptide
VDAKYAKEEAHAWTEIHSLPNLTVDQMAAFITKLFDDPSQSSELLSEAKKLNDSQAPK

SEQ ID NO: 1232 - protein, 58 aa, ARTIFICIAL SEQUENCE
  Engineered IL-6 binding polypeptide
VDAKYAKEEKLAWKEIHLLPNLTISQMAAFITKLFDDPSQSSELLSEAKKLNDSQAPK

SEQ ID NO: 1233 - protein, 58 aa, ARTIFICIAL SEQUENCE
  Engineered IL-6 binding polypeptide
VDAKYAKEEYDAWTEIHKLPNLTVDQMAAFISKLFDDPSQSSELLSEAKKLNDSQAPK

SEQ ID NO: 1234 - protein, 58 aa, ARTIFICIAL SEQUENCE
  Engineered IL-6 binding polypeptide
VDAKYAKEEARAWMEIHNLPNLTVDQMAAFITKLFDDPSQSSELLSEAKKLNDSQAPK

SEQ ID NO: 1235 - protein, 58 aa, ARTIFICIAL SEQUENCE
  Engineered IL-6 binding polypeptide
VDAKYAKEEYRAWTEIHLLPNLTVHQMAAFITKLFDDPSQSSELLSEAKKLNDSQAPK

SEQ ID NO: 1236 - protein, 58 aa, ARTIFICIAL SEQUENCE
  Engineered IL-6 binding polypeptide
VDAKYAKEEYHAWYEIHILPNLTVEQIAAFITKLFDDPSQSSELLSEAKKLNDSQAPK

SEQ ID NO: 1237 - protein, 58 aa, ARTIFICIAL SEQUENCE
  Engineered IL-6 binding polypeptide
VDAKYAKEESDAWKEIHLLPNLTIEQMAAFISKLFDDPSQSSELLSEAKKLNDSQAPK

SEQ ID NO: 1238 - protein, 58 aa, ARTIFICIAL SEQUENCE
  Engineered IL-6 binding polypeptide
VDAKYAKEEAYAWREIHILPNLTVDQMAAFISKLFDDPSQSSELLSEAKKLNDSQAPK

SEQ ID NO: 1239 - protein, 58 aa, ARTIFICIAL SEQUENCE
  Engineered IL-6 binding polypeptide
VDAKYAKEEAAAWNEIHRLPNLTIDQMAAFISKLFDDPSQSSELLSEAKKLNDSQAPK

SEQ ID NO: 1240 - protein, 58 aa, ARTIFICIAL SEQUENCE
  Engineered IL-6 binding polypeptide
VDAKYAKEEYHAWWEIHKLPNLTVNQMAAFITKLFDDPSQSSELLSEAKKLNDSQAPK

SEQ ID NO: 1241 - protein, 58 aa, ARTIFICIAL SEQUENCE
  Engineered IL-6 binding polypeptide
VDAKYAKEEKAAWYEIHKLPNLTIDQMAAFITKLFDDPSQSSELLSEAKKLNDSQAPK

SEQ ID NO: 1242 - protein, 58 aa, ARTIFICIAL SEQUENCE
  Engineered IL-6 binding polypeptide
VDAKYAKEEKEAWTEIHLLPNLTVDQIAAFITKLFDDPSQSSELLSEAKKLNDSQAPK

SEQ ID NO: 1243 - protein, 58 aa, ARTIFICIAL SEQUENCE
  Engineered IL-6 binding polypeptide
VDAKYAKEEKRAWYEIHGLPNLTISQMAAFISKLFDDPSQSSELLSEAKKLNDSQAPK

SEQ ID NO: 1244 - protein, 58 aa, ARTIFICIAL SEQUENCE
  Engineered IL-6 binding polypeptide
VDAKYAKEEARAWYEIHILPNLTVHQMAAFITKLFDDPSQSSELLSEAKKLNDSQAPK

SEQ ID NO: 1245 - protein, 58 aa, ARTIFICIAL SEQUENCE
  Engineered IL-6 binding polypeptide
VDAKYAKEEKTAWVEIHKLPNLTINQMAAFITKLFDDPSQSSELLSEAKKLNDSQAPK

SEQ ID NO: 1246 - protein, 58 aa, ARTIFICIAL SEQUENCE
  Engineered IL-6 binding polypeptide
VDAKYAKEERDAWFEIHILPNLTVEQMAAFITKLFDDPSQSSELLSEAKKLNDSQAPK

SEQ ID NO: 1247 - protein, 58 aa, ARTIFICIAL SEQUENCE
  Engineered IL-6 binding polypeptide
VDAKYAKEEAMAWKEIHGLPNLTIEQMAAFISKLFDDPSQSSELLSEAKKLNDSQAPK

SEQ ID NO: 1248 - protein, 58 aa, ARTIFICIAL SEQUENCE
  Engineered IL-6 binding polypeptide
VDAKYAKEEQYAWREIHILPNLTVHQVAAFISKLFDDPSQSSELLSEAKKLNDSQAPK

SEQ ID NO: 1249 - protein, 58 aa, ARTIFICIAL SEQUENCE
  Engineered IL-6 binding polypeptide
VDAKYAKEEWEAWIEIHNLPNLTVGQMAAFITKLFDDPSQSSELLSEAKKLNDSQAPK

SEQ ID NO: 1250 - protein, 58 aa, ARTIFICIAL SEQUENCE
  Engineered IL-6 binding polypeptide
VDAKYAKEEYAAWTEIHTLPNLTVDQVAAFISKLFDDPSQSSELLSEAKKLNDSQAPK

SEQ ID NO: 1251 - protein, 58 aa, ARTIFICIAL SEQUENCE
  Engineered IL-6 binding polypeptide
VDAKYAKEEEDAWHEIHLLPNLTIEQMAAFITKLFDDPSQSSELLSEAKKLNDSQAPK

SEQ ID NO: 1252 - protein, 58 aa, ARTIFICIAL SEQUENCE
  Engineered IL-6 binding polypeptide
VDAKYAKEERNAWYEIHALPNLTVEQMAAFITKLFDDPSQSSELLSEAKKLNDSQAPK

SEQ ID NO: 1253 - protein, 58 aa, ARTIFICIAL SEQUENCE
  Engineered IL-6 binding polypeptide
VDAKYAKEEKRAWYEIHILPNLTVEQIAAFITKLFDDPSQSSELLSEAKKLNDSQAPK

SEQ ID NO: 1254 - protein, 58 aa, ARTIFICIAL SEQUENCE
  Engineered IL-6 binding polypeptide
VDAKYAKEEYQAWIEIHILPNLTISQMAAFITKLFDDPSQSSELLSEAKKLNDSQAPK

SEQ ID NO: 1255 - protein, 58 aa, ARTIFICIAL SEQUENCE
  Engineered IL-6 binding polypeptide
VDAKYAKEEKRAWYEIHLLPNLTIGQMAAFITKLFDDPSQSSELLSEAKKLNDSQAPK

SEQ ID NO: 1256 - protein, 58 aa, ARTIFICIAL SEQUENCE
  Engineered IL-6 binding polypeptide
VDAKYAKEEYLAWLEIHNLPNLTVDQMAAFITKLFDDPSQSSELLSEAKKLNDSQAPK

SEQ ID NO: 1257 - protein, 58 aa, ARTIFICIAL SEQUENCE
  Engineered IL-6 binding polypeptide
VDAKYAKEEYFAWYEIHNLPNLTVDQMAAFITKLFDDPSQSSELLSEAKKLNDSQAPK

SEQ ID NO: 1258 - protein, 58 aa, ARTIFICIAL SEQUENCE
  Engineered IL-6 binding polypeptide
VDAKYAKEEAFAWWEIHKLPNLTVEQMAAFITKLFDDPSQSSELLSEAKKLNDSQAPK

SEQ ID NO: 1259 - protein, 58 aa, ARTIFICIAL SEQUENCE
  Engineered IL-6 binding polypeptide
VDAKYAKEESIAWQEIHKLPNLTIEQMAAFITKLFDDPSQSSELLSEAKKLNDSQAPK

SEQ ID NO: 1260 - protein, 58 aa, ARTIFICIAL SEQUENCE
  Engineered IL-6 binding polypeptide
VDAKYAKEEWDAWNEIHLLPNLTINQMAAFITKLFDDPSQSSELLSEAKKLNDSQAPK

SEQ ID NO: 1261 - protein, 58 aa, ARTIFICIAL SEQUENCE
  Engineered IL-6 binding polypeptide
VDAKYAKEEAYAWNEIHRLPNLTVEQMAAFITKLFDDPSQSSELLSEAKKLNDSQAPK

SEQ ID NO: 1262 - protein, 58 aa, ARTIFICIAL SEQUENCE
  Engineered IL-6 binding polypeptide
VDAKYAKEEAEAWFEIHKLPNLTVGQMAAFITKLFDDPSQSSELLSEAKKLNDSQAPK

SEQ ID NO: 1263 - protein, 58 aa, ARTIFICIAL SEQUENCE
  Engineered IL-6 binding polypeptide
VDAKYAKEEREAWHEIHILPNLTVEQVAAFITKLFDDPSQSSELLSEAKKLNDSQAPK

SEQ ID NO: 1264 - protein, 58 aa, ARTIFICIAL SEQUENCE
  Engineered IL-6 binding polypeptide
VDAKYAKEEHDAWMEIHLLPNLTIEQMAAFITKLFDDPSQSSELLSEAKKLNDSQAPK

SEQ ID NO: 1265 - protein, 58 aa, ARTIFICIAL SEQUENCE
  Engineered IL-6 binding polypeptide
VDAKYAKEEYSAWIEIHLLPNLTVSQMAAFITKLFDDPSQSSELLSEAKKLNDSQAPK

SEQ ID NO: 1266 - protein, 58 aa, ARTIFICIAL SEQUENCE
  Engineered IL-6 binding polypeptide
VDAKYAKEEYDAWYEIHTLPNLTVDQVAAFITKLFDDPSQSSELLSEAKKLNDSQAPK

SEQ ID NO: 1267 - protein, 58 aa, ARTIFICIAL SEQUENCE
  Engineered IL-6 binding polypeptide
VDAKYAKEEKMAWTEIHNLPNLTIDQMAAFITKLFDDPSQSSELLSEAKKLNDSQAPK

SEQ ID NO: 1268 - protein, 58 aa, ARTIFICIAL SEQUENCE
  Engineered IL-6 binding polypeptide
VDAKYAKEEYAAWFEIHSLPNLTVEQMAAFITKLFDDPSQSSELLSEAKKLNDSQAPK

SEQ ID NO: 1269 - protein, 58 aa, ARTIFICIAL SEQUENCE
  Engineered IL-6 binding polypeptide
VDAKYAKEERRAWDEIHRLPNLTIEQMAAFITKLFDDPSQSSELLSEAKKLNDSQAPK

SEQ ID NO: 1270 - protein, 58 aa, ARTIFICIAL SEQUENCE
  Engineered IL-6 binding polypeptide
VDAKYAKEEYDAWLEIHLLPNLTIEQMAAFITKLFDDPSQSSELLSEAKKLNDSQAPK

SEQ ID NO: 1271 - protein, 58 aa, ARTIFICIAL SEQUENCE
  Engineered IL-6 binding polypeptide
VDAKYAKEEYDAWNEIHTLPNLTIDQMAAFITKLFDDPSQSSELLSEAKKLNDSQAPK

SEQ ID NO: 1272 - protein, 58 aa, ARTIFICIAL SEQUENCE
  Engineered IL-6 binding polypeptide
VDAKYAKEERVAWNEIHKLPNLTIDQMAAFITKLFDDPSQSSELLSEAKKLNDSQAPK

SEQ ID NO: 1273 - protein, 58 aa, ARTIFICIAL SEQUENCE
  Engineered IL-6 binding polypeptide
VDAKYAKEEAHAWTEIHKLPNLTVDQMAAFITKLFDDPSQSSELLSEAKKLNDSQAPK

SEQ ID NO: 1274 - protein, 58 aa, ARTIFICIAL SEQUENCE
  Engineered IL-6 binding polypeptide
VDAKYAKEEYRAWMEIHLLPNLTIDQMAAFITKLFDDPSQSSELLSEAKKLNDSQAPK

SEQ ID NO: 1275 - protein, 58 aa, ARTIFICIAL SEQUENCE
  Engineered IL-6 binding polypeptide
VDAKYAKEESAAWTEIHLLPNLTIEQMAAFITKLFDDPSQSSELLSEAKKLNDSQAPK

SEQ ID NO: 1276 - protein, 58 aa, ARTIFICIAL SEQUENCE
  Engineered IL-6 binding polypeptide
VDAKYAKEEYFAWTEIHVLPNLTVKQIAAFITKLFDDPSQSSELLSEAKKLNDSQAPK

SEQ ID NO: 1277 - protein, 58 aa, ARTIFICIAL SEQUENCE
  Engineered IL-6 binding polypeptide
VDAKYAKEEFHAWSEIHLLPNLTVSQMAAFISKLFDDPSQSSELLSEAKKLNDSQAPK

SEQ ID NO: 1278 - protein, 58 aa, ARTIFICIAL SEQUENCE
  Engineered IL-6 binding polypeptide
VDAKYAKEEYDAWTEIHALPNLTVDQVAAFITKLFDDPSQSSELLSEAKKLNDSQAPK

SEQ ID NO: 1279 - protein, 58 aa, ARTIFICIAL SEQUENCE
  Engineered IL-6 binding polypeptide
VDAKYAKEEKAAWFEIHNLPNLTISQMAAFITKLFDDPSQSSELLSEAKKLNDSQAPK

SEQ ID NO: 1280 - protein, 58 aa, ARTIFICIAL SEQUENCE
  Engineered IL-6 binding polypeptide
VDAKYAKEEYQAWIEIHALPNLTIEQMAAFITKLFDDPSQSSELLSEAKKLNDSQAPK

SEQ ID NO: 1281 - protein, 58 aa, ARTIFICIAL SEQUENCE
  Engineered IL-6 binding polypeptide
VDAKYAKEEYDAWVEIHKLPNLTINQMAAFITKLFDDPSQSSELLSEAKKLNDSQAPK

SEQ ID NO: 1282 - protein, 58 aa, ARTIFICIAL SEQUENCE
  Engineered IL-6 binding polypeptide
VDAKYAKEEQSAWMEIHILPNLTVSQIAAFISKLFDDPSQSSELLSEAKKLNDSQAPK

SEQ ID NO: 1283 - protein, 58 aa, ARTIFICIAL SEQUENCE
  Engineered IL-6 binding polypeptide
VDAKYAKEERAAWNEIHSLPNLTVEQMAAFITKLFDDPSQSSELLSEAKKLNDSQAPK

SEQ ID NO: 1284 - protein, 58 aa, ARTIFICIAL SEQUENCE
  Engineered IL-6 binding polypeptide
VDAKYAKEEHEAWNEIHKLPNLTIDQMAAFITKLFDDPSQSSELLSEAKKLNDSQAPK

SEQ ID NO: 1285 - protein, 58 aa, ARTIFICIAL SEQUENCE
  Engineered IL-6 binding polypeptide
VDAKYAKEERFAWWEIHRLPNLTVRQVAAFISKLFDDPSQSSELLSEAKKLNDSQAPK

SEQ ID NO: 1286 - protein, 58 aa, ARTIFICIAL SEQUENCE
  Engineered IL-6 binding polypeptide
VDAKYAKEEFEAWYEIHILPNLTVEQMAAFITKLFDDPSQSSELLSEAKKLNDSQAPK

SEQ ID NO: 1287 - protein, 58 aa, ARTIFICIAL SEQUENCE
  Engineered IL-6 binding polypeptide
VDAKYAKEEKDAWNEIHRLPNLTVDQVAAFITKLFDDPSQSSELLSEAKKLNDSQAPK

SEQ ID NO: 1288 - protein, 58 aa, ARTIFICIAL SEQUENCE
  Engineered IL-6 binding polypeptide
VDAKYAKEEARAWYEIHVLPNLTVHQIAAFITKLFDDPSQSSELLSEAKKLNDSQAPK

SEQ ID NO: 1289 - protein, 58 aa, ARTIFICIAL SEQUENCE
  Engineered IL-6 binding polypeptide
VDAKYAKEERRAWNEIHKLPNLTVEQMAAFITKLFDDPSQSSELLSEAKKLNDSQAPK

SEQ ID NO: 1290 - protein, 58 aa, ARTIFICIAL SEQUENCE
  Engineered IL-6 binding polypeptide
VDAKYAKEEYMAWDEIHRLPNLTVEQMAAFITKLFDDPSQSSELLSEAKKLNDSQAPK

SEQ ID NO: 1291 - protein, 58 aa, ARTIFICIAL SEQUENCE
  Engineered IL-6 binding polypeptide
VDAKYAKEERNAWFEIHALPNLTIDQMAAFITKLFDDPSQSSELLSEAKKLNDSQAPK

SEQ ID NO: 1292 - protein, 58 aa, ARTIFICIAL SEQUENCE
  Engineered IL-6 binding polypeptide
VDAKYAKEEAEAWQEIHLLPNLTVGQMAAFISKLFDDPSQSSELLSEAKKLNDSQAPK

SEQ ID NO: 1293 - protein, 58 aa, ARTIFICIAL SEQUENCE
  Engineered IL-6 binding polypeptide
VDAKYAKEEKNAWYEIHLLPNLTIQQMAAFISKLFDDPSQSSELLSEAKKLNDSQAPK

SEQ ID NO: 1294 - protein, 58 aa, ARTIFICIAL SEQUENCE
  Engineered IL-6 binding polypeptide
VDAKYAKEEAIAWHEIHLLPNLTITQMAAFITKLFDDPSQSSELLSEAKKLNDSQAPK

SEQ ID NO: 1295 - protein, 58 aa, ARTIFICIAL SEQUENCE
  Engineered IL-6 binding polypeptide
VDAKYAKEEKDAWEEIHRLPNLTVTQMAAFISKLFDDPSQSSELLSEAKKLNDSQAPK

SEQ ID NO: 1296 - protein, 58 aa, ARTIFICIAL SEQUENCE
  Engineered IL-6 binding polypeptide
VDAKYAKEEYDAWFEIHLLPNLTVQQIAAFITKLFDDPSQSSELLSEAKKLNDSQAPK

SEQ ID NO: 1297 - protein, 58 aa, ARTIFICIAL SEQUENCE
  Engineered IL-6 binding polypeptide
VDAKYAKEEAAAWMEIHLLPNLTVEQMAAFITKLFDDPSQSSELLSEAKKLNDSQAPK

SEQ ID NO: 1298 - protein, 58 aa, ARTIFICIAL SEQUENCE
  Engineered IL-6 binding polypeptide
VDAKYAKEERKAWNEIHQLPNLTIQQVAAFITKLFDDPSQSSELLSEAKKLNDSQAPK

SEQ ID NO: 1299 - protein, 58 aa, ARTIFICIAL SEQUENCE
  Engineered IL-6 binding polypeptide
VDAKYAKEEYAAWWEIHALPNLTVEQVAAFITKLFDDPSQSSELLSEAKKLNDSQAPK

SEQ ID NO: 1300 - protein, 58 aa, ARTIFICIAL SEQUENCE
  Engineered IL-6 binding polypeptide
VDAKYAKEEKEAWMEIHILPNLTIDQMAAFITKLFDDPSQSSELLSEAKKLNDSQAPK

SEQ ID NO: 1301 - protein, 58 aa, ARTIFICIAL SEQUENCE
  Engineered IL-6 binding polypeptide
VDAKYAKEEKIAWKEIHLLPNLTISQMAAFITKLFDDPSQSSELLSEAKKLNDSQAPK

SEQ ID NO: 1302 - protein, 58 aa, ARTIFICIAL SEQUENCE
  Engineered IL-6 binding polypeptide
VDAKYAKEEHAAWMEIHLLPNLTVDQMAAFITKLFDDPSQSSELLSEAKKLNDSQAPK

SEQ ID NO: 1303 - protein, 58 aa, ARTIFICIAL SEQUENCE
  Engineered IL-6 binding polypeptide
VDAKYAKEEKDAWYEIHILPNLTVDQMAAFITKLFDDPSQSSELLSEAKKLNDSQAPK

SEQ ID NO: 1304 - protein, 58 aa, ARTIFICIAL SEQUENCE
  Engineered IL-6 binding polypeptide
VDAKYAKEERAAWNEIHKLPNLTIEQMAAFITKLFDDPSQSSELLSEAKKLNDSQAPK

SEQ ID NO: 1305 - protein, 58 aa, ARTIFICIAL SEQUENCE
  Engineered IL-6 binding polypeptide
VDAKYAKEEAAAWFEIHILPNLTVGQIAAFITKLFDDPSQSSELLSEAKKLNDSQAPK

SEQ ID NO: 1306 - protein, 58 aa, ARTIFICIAL SEQUENCE
  Engineered IL-6 binding polypeptide
VDAKYAKEEKFAWTEIHNLPNLTVDQMAAFITKLFDDPSQSSELLSEAKKLNDSQAPK

SEQ ID NO: 1307 - protein, 58 aa, ARTIFICIAL SEQUENCE
  Engineered IL-6 binding polypeptide
VDAKYAKEEWLAWNEIHLLPNLTVDQMAAFITKLFDDPSQSSELLSEAKKLNDSQAPK

SEQ ID NO: 1308 - protein, 58 aa, ARTIFICIAL SEQUENCE
  Engineered IL-6 binding polypeptide
VDAKYAKEEQRAWREIHILPNLTIDQMAAFITKLFDDPSQSSELLSEAKKLNDSQAPK

SEQ ID NO: 1309 - protein, 58 aa, ARTIFICIAL SEQUENCE
  Engineered IL-6 binding polypeptide
VDAKYAKEEFQAWREIHLLPNLTIEQMAAFITKLFDDPSQSSELLSEAKKLNDSQAPK

SEQ ID NO: 1310 - protein, 58 aa, ARTIFICIAL SEQUENCE
  Engineered IL-6 binding polypeptide
VDAKYAKEERMAWHEIHILPNLTVSQVAAFITKLFDDPSQSSELLSEAKKLNDSQAPK

SEQ ID NO: 1311 - protein, 58 aa, ARTIFICIAL SEQUENCE
  Engineered IL-6 binding polypeptide
VDAKYAKEEKKAWYEIHILPNLTVNQIAAFITKLFDDPSQSSELLSEAKKLNDSQAPK

SEQ ID NO: 1312 - protein, 58 aa, ARTIFICIAL SEQUENCE
  Engineered IL-6 binding polypeptide
VDAKYAKEEYYAWNEIHKLPNLTVIQVAAFITKLFDDPSQSSELLSEAKKLNDSQAPK

SEQ ID NO: 1313 - protein, 58 aa, ARTIFICIAL SEQUENCE
  Engineered IL-6 binding polypeptide
VDAKYAKEEADAWREIHLLPNLTLEQMAAFITKLFDDPSQSSELLSEAKKLNDSQAPK

SEQ ID NO: 1314 - protein, 58 aa, ARTIFICIAL SEQUENCE
  Engineered IL-6 binding polypeptide
VDAKYAKEEYEAWNEIHRLPNLTIDQMAAFISKLFDDPSQSSELLSEAKKLNDSQAPK

SEQ ID NO: 1315 - protein, 58 aa, ARTIFICIAL SEQUENCE
  Engineered IL-6 binding polypeptide
VDAKYAKEEKKAWWEIHALPNLTVNQVAAFISKLFDDPSQSSELLSEAKKLNDSQAPK

SEQ ID NO: 1316 - protein, 58 aa, ARTIFICIAL SEQUENCE
  Engineered IL-6 binding polypeptide
VDAKYAKEEKTAWREIHLLPNLTIEQMAAFITKLFDDPSQSSELLSEAKKLNDSQAPK

SEQ ID NO: 1317 - protein, 58 aa, ARTIFICIAL SEQUENCE
  Engineered IL-6 binding polypeptide
VDAKYAKEEKDAWYEIHLLPNLTVDQIAAFITKLFDDPSQSSELLSEAKKLNDSQAPK

SEQ ID NO: 1318 - protein, 58 aa, ARTIFICIAL SEQUENCE
  Engineered IL-6 binding polypeptide
VDAKYAKEEYTAWYEIHILPNLTIKQMAAFISKLFDDPSQSSELLSEAKKLNDSQAPK

SEQ ID NO: 1319 - protein, 58 aa, ARTIFICIAL SEQUENCE
  Engineered IL-6 binding polypeptide
VDAKYAKEEYHAWYEIHLLPNLTIEQIAAFITKLFDDPSQSSELLSEAKKLNDSQAPK

SEQ ID NO: 1320 - protein, 58 aa, ARTIFICIAL SEQUENCE
  Engineered IL-6 binding polypeptide
VDAKYAKEEAHAWREIHLLPNLTVLQMAAFITKLFDDPSQSSELLSEAKKLNDSQAPK

SEQ ID NO: 1321 - protein, 58 aa, ARTIFICIAL SEQUENCE
  Engineered IL-6 binding polypeptide
VDAKYAKEEYEAWNEIHKLPNLTIDQMAAFITKLFDDPSQSSELLSEAKKLNDSQAPK

SEQ ID NO: 1322 - protein, 58 aa, ARTIFICIAL SEQUENCE
  Engineered IL-6 binding polypeptide
VDAKYAKEERAAWNEIHALPNLTIDQMAAFITKLFDDPSQSSELLSEAKKLNDSQAPK

SEQ ID NO: 1323 - protein, 58 aa, ARTIFICIAL SEQUENCE
  Engineered IL-6 binding polypeptide
VDAKYAKEEFDAWVEIHLLPNLTIDQMAAFITKLFDDPSQSSELLSEAKKLNDSQAPK

SEQ ID NO: 1324 - protein, 58 aa, ARTIFICIAL SEQUENCE
  Engineered IL-6 binding polypeptide
VDAKYAKEEKAAWKEIHILPNLTVDQMAAFITKLFDDPSQSSELLSEAKKLNDSQAPK

SEQ ID NO: 1325 - protein, 58 aa, ARTIFICIAL SEQUENCE
  Engineered IL-6 binding polypeptide
VDAKYAKEEWDAWLEIHALPNLTVDQVAAFISKLFDDPSQSSELLSEAKKLNDSQAPK

SEQ ID NO: 1326 - protein, 58 aa, ARTIFICIAL SEQUENCE
  Engineered IL-6 binding polypeptide
VDAKYAKEEYNAWYEIHSLPNLTVEQMAAFITKLFDDPSQSSELLSEAKKLNDSQAPK

SEQ ID NO: 1327 - protein, 58 aa, ARTIFICIAL SEQUENCE
  Engineered IL-6 binding polypeptide
VDAKYAKEEWNAWNEIHKLPNLTVEQMAAFITKLFDDPSQSSELLSEAKKLNDSQAPK

SEQ ID NO: 1328 - protein, 58 aa, ARTIFICIAL SEQUENCE
  Engineered IL-6 binding polypeptide
VDAKYAKEEKEAWFEIHILPNLTVEQIAAFISKLFDDPSQSSELLSEAKKLNDSQAPK

SEQ ID NO: 1329 - protein, 58 aa, ARTIFICIAL SEQUENCE
  Engineered IL-6 binding polypeptide
VDAKYAKEEATAWWEIHKLPNLTVQQVAAFISKLFDDPSQSSELLSEAKKLNDSQAPK

SEQ ID NO: 1330 - protein, 58 aa, ARTIFICIAL SEQUENCE
  Engineered IL-6 binding polypeptide
VDAKYAKEEYEAWYEIHILPNLTVGQIAAFITKLFDDPSQSSELLSEAKKLNDSQAPK

SEQ ID NO: 1331 - protein, 58 aa, ARTIFICIAL SEQUENCE
  Engineered IL-6 binding polypeptide
VDAKYAKEEANAWKEIHLLPNLTVGQVAAFITKLFDDPSQSSELLSEAKKLNDSQAPK

SEQ ID NO: 1332 - protein, 58 aa, ARTIFICIAL SEQUENCE
  Engineered IL-6 binding polypeptide
VDAKYAKEEKRAWHEIHVLPNLTVEQIAAFITKLFDDPSQSSELLSEAKKLNDSQAPK

SEQ ID NO: 1333 - protein, 58 aa, ARTIFICIAL SEQUENCE
  Engineered IL-6 binding polypeptide
VDAKYAKEEYDAWVEIHLLPNLTIDQIAAFITKLFDDPSQSSELLSEAKKLNDSQAPK

SEQ ID NO: 1334 - protein, 58 aa, ARTIFICIAL SEQUENCE
  Engineered IL-6 binding polypeptide
VDAKYAKEEAEAWFEIHILPNLTINQIAAFITKLFDDPSQSSELLSEAKKLNDSQAPK

SEQ ID NO: 1335 - protein, 58 aa, ARTIFICIAL SEQUENCE
  Engineered IL-6 binding polypeptide
VDAKYAKEEWHAWNEIHKLPNLTIDQMAAFITKLFDDPSQSSELLSEAKKLNDSQAPK

SEQ ID NO: 1336 - protein, 58 aa, ARTIFICIAL SEQUENCE
  Engineered IL-6 binding polypeptide
VDAKYAKEEYEAWFEIHILPNLTVDQIAAFITKLFDDPSQSSELLSEAKKLNDSQAPK

SEQ ID NO: 1337 - protein, 58 aa, ARTIFICIAL SEQUENCE
  Engineered IL-6 binding polypeptide
VDAKYAKEEYEAWREIHLLPNLTVSQMAAFITKLFDDPSQSSELLSEAKKLNDSQAPK

SEQ ID NO: 1338 - protein, 58 aa, ARTIFICIAL SEQUENCE
  Engineered IL-6 binding polypeptide
VDAKYAKEERAAWFEIHILPNLTISQMAAFITKLFDDPSQSSELLSEAKKLNDSQAPK

SEQ ID NO: 1339 - protein, 58 aa, ARTIFICIAL SEQUENCE
  Engineered IL-6 binding polypeptide
VDAKYAKEEAQAWKEIHLLPNLTIEQMAAFISKLFDDPSQSSELLSEAKKLNDSQAPK

SEQ ID NO: 1340 - protein, 58 aa, ARTIFICIAL SEQUENCE
  Engineered IL-6 binding polypeptide
VDAKYAKEEKAAWFEIHILPNLTIHQMAAFITKLFDDPSQSSELLSEAKKLNDSQAPK

SEQ ID NO: 1341 - protein, 58 aa, ARTIFICIAL SEQUENCE
  Engineered IL-6 binding polypeptide
VDAKYAKEEYEAWIEIHNLPNLTIEQMAAFITKLFDDPSQSSELLSEAKKLNDSQAPK

SEQ ID NO: 1342 - protein, 58 aa, ARTIFICIAL SEQUENCE
  Engineered IL-6 binding polypeptide
VDAKYAKEEKYAWVEIHKLPNLTVEQVAAFITKLFDDPSQSSELLSEAKKLNDSQAPK

SEQ ID NO: 1343 - protein, 58 aa, ARTIFICIAL SEQUENCE
  Engineered IL-6 binding polypeptide
VDAKYAKEEYHAWWEIHLLPNLTVEQMAAFITKLFDDPSQSSELLSEAKKLNDSQAPK

SEQ ID NO: 1344 - protein, 58 aa, ARTIFICIAL SEQUENCE
  Engineered IL-6 binding polypeptide
VDAKYAKEEKAAWNEIHLLPNLTIDQIAAFITKLFDDPSQSSELLSEAKKLNDSQAPK

SEQ ID NO: 1345 - protein, 58 aa, ARTIFICIAL SEQUENCE
  Engineered IL-6 binding polypeptide
VDAKYAKEEYRAWIEIHLLPNLTVEQMAAFISKLFDDPSQSSELLSEAKKLNDSQAPK

SEQ ID NO: 1346 - protein, 58 aa, ARTIFICIAL SEQUENCE
  Engineered IL-6 binding polypeptide
VDAKYAKEEHDAWFEIHLLPNLTIEQMAAFITKLFDDPSQSSELLSEAKKLNDSQAPK

SEQ ID NO: 1347 - protein, 58 aa, ARTIFICIAL SEQUENCE
  Engineered IL-6 binding polypeptide
VDAKYAKEERNAWMEIHLLPNLTVEQMAAFITKLFDDPSQSSELLSEAKKLNDSQAPK

SEQ ID NO: 1348 - protein, 58 aa, ARTIFICIAL SEQUENCE
  Engineered IL-6 binding polypeptide
VDAKYAKEEKHAWYEIHVLPNLTVDQMAAFITKLFDDPSQSSELLSEAKKLNDSQAPK

SEQ ID NO: 1349 - protein, 58 aa, ARTIFICIAL SEQUENCE
  Engineered IL-6 binding polypeptide
VDAKYAKEEHDAWYEIHILPNLTIHQMAAFITKLFDDPSQSSELLSEAKKLNDSQAPK

SEQ ID NO: 1350 - protein, 58 aa, ARTIFICIAL SEQUENCE
  Engineered IL-6 binding polypeptide
VDAKYAKEEKEAWYEIHLLPNLTVNQMAAFITKLFDDPSQSSELLSEAKKLNDSQAPK

SEQ ID NO: 1351 - protein, 58 aa, ARTIFICIAL SEQUENCE
  Engineered IL-6 binding polypeptide
VDAKYAKEEAAAWMEIHLLPNLTVGQMAAFITKLFDDPSQSSELLSEAKKLNDSQAPK

SEQ ID NO: 1352 - protein, 58 aa, ARTIFICIAL SEQUENCE
  Engineered IL-6 binding polypeptide
VDAKYAKEEAYAWREIHLLPNLTVDQMAAFITKLFDDPSQSSELLSEAKKLNDSQAPK

SEQ ID NO: 1353 - protein, 58 aa, ARTIFICIAL SEQUENCE
  Engineered IL-6 binding polypeptide
VDAKYAKEEYQAWTEIHTLPNLTVDQMAAFITKLFDDPSQSSELLSEAKKLNDSQAPK

SEQ ID NO: 1354 - protein, 58 aa, ARTIFICIAL SEQUENCE
  Engineered IL-6 binding polypeptide
VDAKYAKEEKDAWYEIHLLPNLTVDQMAAFITKLFDDPSQSSELLSEAKKLNDSQAPK

SEQ ID NO: 1355 - protein, 58 aa, ARTIFICIAL SEQUENCE
  Engineered IL-6 binding polypeptide
VDAKYAKEEANAWWEIHLLPNLTVEQMAAFITKLFDDPSQSSELLSEAKKLNDSQAPK

SEQ ID NO: 1356 - protein, 58 aa, ARTIFICIAL SEQUENCE
  Engineered IL-6 binding polypeptide
VDAKYAKEEAKAWHEIHILPNLTITQMAAFITKLFDDPSQSSELLSEAKKLNDSQAPK

SEQ ID NO: 1357 - protein, 58 aa, ARTIFICIAL SEQUENCE
  Engineered IL-6 binding polypeptide
VDAKYAKEEWSAWVEIHSLPNLTVSQIAAFITKLFDDPSQSSELLSEAKKLNDSQAPK

SEQ ID NO: 1358 - protein, 58 aa, ARTIFICIAL SEQUENCE
  Engineered IL-6 binding polypeptide
VDAKYAKEERRAWYEIHILPNLTVEQMAAFITKLFDDPSQSSELLSEAKKLNDSQAPK

SEQ ID NO: 1359 - protein, 58 aa, ARTIFICIAL SEQUENCE
  Engineered IL-6 binding polypeptide
VDAKYAKEEKDAWFEIHVLPNLTVDQMAAFITKLFDDPSQSSELLSEAKKLNDSQAPK

SEQ ID NO: 1360 - protein, 58 aa, ARTIFICIAL SEQUENCE
  Engineered IL-6 binding polypeptide
VDAKYAKEEKRAWLEIHNLPNLTIDQMAAFISKLFDDPSQSSELLSEAKKLNDSQAPK

SEQ ID NO: 1361 - protein, 58 aa, ARTIFICIAL SEQUENCE
  Engineered IL-6 binding polypeptide
VDAKYAKEEHGAWTEIHLLPNLTIEQVAAFITKLFDDPSQSSELLSEAKKLNDSQAPK

SEQ ID NO: 1362 - protein, 58 aa, ARTIFICIAL SEQUENCE
  Engineered IL-6 binding polypeptide
VDAKYAKEERKAWIEIHLLPNLTIEQMAAFITKLFDDPSQSSELLSEAKKLNDSQAPK

SEQ ID NO: 1363 - protein, 58 aa, ARTIFICIAL SEQUENCE
  Engineered IL-6 binding polypeptide
VDAKYAKEERSAWTEIHLLPNLTIDQMAAFITKLFDDPSQSSELLSEAKKLNDSQAPK

SEQ ID NO: 1364 - protein, 58 aa, ARTIFICIAL SEQUENCE
  Engineered IL-6 binding polypeptide
VDAKYAKEELKAWTEIHNLPNLTIDQMAAFITKLFDDPSQSSELLSEAKKLNDSQAPK

SEQ ID NO: 1365 - protein, 58 aa, ARTIFICIAL SEQUENCE
  Engineered IL-6 binding polypeptide
VDAKYAKEEANAWYEIHILPNLTVDQVAAFITKLFDDPSQSSELLSEAKKLNDSQAPK

SEQ ID NO: 1366 - protein, 58 aa, ARTIFICIAL SEQUENCE
  Engineered IL-6 binding polypeptide
VDAKYAKEEWQAWWEIHALPNLTVEQVAAFITKLFDDPSQSSELLSEAKKLNDSQAPK

SEQ ID NO: 1367 - protein, 58 aa, ARTIFICIAL SEQUENCE
  Engineered IL-6 binding polypeptide
VDAKYAKEEYNAWLEIHSLPNLTVTQMAAFITKLFDDPSQSSELLSEAKKLNDSQAPK

SEQ ID NO: 1368 - protein, 58 aa, ARTIFICIAL SEQUENCE
  Engineered IL-6 binding polypeptide
VDAKYAKEEKKAWTEIHTLPNLTVEQMAAFITKLFDDPSQSSELLSEAKKLNDSQAPK

SEQ ID NO: 1369 - protein, 58 aa, ARTIFICIAL SEQUENCE
  Engineered IL-6 binding polypeptide
VDAKYAKEEKAAWYEIHLLPNLTVVQMAAFITKLFDDPSQSSELLSEAKKLNDSQAPK

SEQ ID NO: 1370 - protein, 58 aa, ARTIFICIAL SEQUENCE
  Engineered IL-6 binding polypeptide
VDAKYAKEEKAAWREIHLLPNLTINQMAAFITKLFDDPSQSSELLSEAKKLNDSQAPK

SEQ ID NO: 1371 - protein, 58 aa, ARTIFICIAL SEQUENCE
  Engineered IL-6 binding polypeptide
VDAKYAKEEFEAWVEIHLLPNLTIEQIAAFITKLFDDPSQSSELLSEAKKLNDSQAPK

SEQ ID NO: 1372 - protein, 58 aa, ARTIFICIAL SEQUENCE
  Engineered IL-6 binding polypeptide
VDAKYAKEEYAAWVEIHNLPNLTVEQMAAFITKLFDDPSQSSELLSEAKKLNDSQAPK

SEQ ID NO: 1373 - protein, 58 aa, ARTIFICIAL SEQUENCE
  Engineered IL-6 binding polypeptide
VDAKYAKEESDAWYEIHTLPNLTINQMAAFISKLFDDPSQSSELLSEAKKLNDSQAPK

SEQ ID NO: 1374 - protein, 58 aa, ARTIFICIAL SEQUENCE
  Engineered IL-6 binding polypeptide
VDAKYAKEEKFAWTEIHILPNLTVDQMAAFITKLFDDPSQSSELLSEAKKLNDSQAPK

SEQ ID NO: 1375 - protein, 58 aa, ARTIFICIAL SEQUENCE
  Engineered IL-6 binding polypeptide
VDAKYAKEEAEAWWEIHILPNLTVSQIAAFISKLFDDPSQSSELLSEAKKLNDSQAPK

SEQ ID NO: 1376 - protein, 58 aa, ARTIFICIAL SEQUENCE
  Engineered IL-6 binding polypeptide
VDAKYAKEEYQAWFEIHLLPNLTINQMAAFISKLFDDPSQSSELLSEAKKLNDSQAPK

SEQ ID NO: 1377 - protein, 58 aa, ARTIFICIAL SEQUENCE
  Engineered IL-6 binding polypeptide
VDAKYAKEEAKAWTEIHTLPNLTVDQMAAFITKLFDDPSQSSELLSEAKKLNDSQAPK

SEQ ID NO: 1378 - protein, 58 aa, ARTIFICIAL SEQUENCE
  Engineered IL-6 binding polypeptide
VDAKYAKEEQLAWTEIHKLPNLTIDQMAAFITKLFDDPSQSSELLSEAKKLNDSQAPK

SEQ ID NO: 1379 - protein, 58 aa, ARTIFICIAL SEQUENCE
  Engineered IL-6 binding polypeptide
VDAKYAKEEYDAWTEIHLLPNLTIEQMAAFITKLFDDPSQSSELLSEAKKLNDSQAPK

SEQ ID NO: 1380 - protein, 58 aa, ARTIFICIAL SEQUENCE
  Engineered IL-6 binding polypeptide
VDAKYAKEEWDAWVEIHTLPNLTVDQMAAFITKLFDDPSQSSELLSEAKKLNDSQAPK

SEQ ID NO: 1381 - protein, 58 aa, ARTIFICIAL SEQUENCE
  Engineered IL-6 binding polypeptide
VDAKYAKEEFEAWHEIHILPNLTVQQMAAFITKLFDDPSQSSELLSEAKKLNDSQAPK

SEQ ID NO: 1382 - protein, 58 aa, ARTIFICIAL SEQUENCE
  Engineered IL-6 binding polypeptide
VDAKYAKEEWEAWVEIHNLPNLTIDQMAAFITKLFDDPSQSSELLSEAKKLNDSQAPK

SEQ ID NO: 1383 - protein, 58 aa, ARTIFICIAL SEQUENCE
  Engineered IL-6 binding polypeptide
VDAKYAKEERAAWWEIHGLPNLTVDQMAAFITKLFDDPSQSSELLSEAKKLNDSQAPK

SEQ ID NO: 1384 - protein, 58 aa, ARTIFICIAL SEQUENCE
  Engineered IL-6 binding polypeptide
VDAKYAKEERDAWHEIHRLPNLTIEQMAAFISKLFDDPSQSSELLSEAKKLNDSQAPK

SEQ ID NO: 1385 - protein, 58 aa, ARTIFICIAL SEQUENCE
  Engineered IL-6 binding polypeptide
VDAKYAKEEKTAWTEIHILPNLTIHQMAAFISKLFDDPSQSSELLSEAKKLNDSQAPK

SEQ ID NO: 1386 - protein, 58 aa, ARTIFICIAL SEQUENCE
  Engineered IL-6 binding polypeptide
VDAKYAKEEFDAWMEIHLLPNLTINQMAAFITKLFDDPSQSSELLSEAKKLNDSQAPK

SEQ ID NO: 1387 - protein, 58 aa, ARTIFICIAL SEQUENCE
  Engineered IL-6 binding polypeptide
VDAKYAKEEHLAWVEIHNLPNLTVEQMAAFITKLFDDPSQSSELLSEAKKLNDSQAPK

SEQ ID NO: 1388 - protein, 58 aa, ARTIFICIAL SEQUENCE
  Engineered IL-6 binding polypeptide
VDAKYAKEERHAWWEIHKLPNLTIEQMAAFITKLFDDPSQSSELLSEAKKLNDSQAPK

SEQ ID NO: 1389 - protein, 58 aa, ARTIFICIAL SEQUENCE
  Engineered IL-6 binding polypeptide
VDAKYAKEEYDAWFEIHLLPNLTVEQMAAFITKLFDDPSQSSELLSEAKKLNDSQAPK

SEQ ID NO: 1390 - protein, 58 aa, ARTIFICIAL SEQUENCE
  Engineered IL-6 binding polypeptide
VDAKYAKEEKWAWTEIHLLPNLTIEQMAAFISKLFDDPSQSSELLSEAKKLNDSQAPK

SEQ ID NO: 1391 - protein, 58 aa, ARTIFICIAL SEQUENCE
  Engineered IL-6 binding polypeptide
VDAKYAKEEAKAWFEIHILPNLTIEQIAAFITKLFDDPSQSSELLSEAKKLNDSQAPK

SEQ ID NO: 1392 - protein, 58 aa, ARTIFICIAL SEQUENCE
  Engineered IL-6 binding polypeptide
VDAKYAKEEYRAWTEIHLLPNLTIHQMAAFITKLFDDPSQSSELLSEAKKLNDSQAPK

SEQ ID NO: 1393 - protein, 58 aa, ARTIFICIAL SEQUENCE
  Engineered IL-6 binding polypeptide
VDAKYAKEEKHAWTEIHILPNLTVEQMAAFITKLFDDPSQSSELLSEAKKLNDSQAPK

SEQ ID NO: 1394 - protein, 58 aa, ARTIFICIAL SEQUENCE
  Engineered IL-6 binding polypeptide
VDAKYAKEEARAWTEIHTLPNLTIDQIAAFITKLFDDPSQSSELLSEAKKLNDSQAPK

SEQ ID NO: 1395 - protein, 58 aa, ARTIFICIAL SEQUENCE
  Engineered IL-6 binding polypeptide
VDAKYAKEEYAAWVEIHSLPNLTVDQMAAFITKLFDDPSQSSELLSEAKKLNDSQAPK

SEQ ID NO: 1396 - protein, 58 aa, ARTIFICIAL SEQUENCE
  Engineered IL-6 binding polypeptide
VDAKYAKEEYDAWYEIHLLPNLTINQMAAFITKLFDDPSQSSELLSEAKKLNDSQAPK

SEQ ID NO: 1397 - protein, 58 aa, ARTIFICIAL SEQUENCE
  Engineered IL-6 binding polypeptide
VDAKYAKEEFNAWNEIHLLPNLTVTQMAAFITKLFDDPSQSSELLSEAKKLNDSQAPK

SEQ ID NO: 1398 - protein, 58 aa, ARTIFICIAL SEQUENCE
  Engineered IL-6 binding polypeptide
VDAKYAKEEKAAWNEIHLLPNLTIDQMAAFISKLFDDPSQSSELLSEAKKLNDSQAPK

SEQ ID NO: 1399 - protein, 58 aa, ARTIFICIAL SEQUENCE
  Engineered IL-6 binding polypeptide
VDAKYAKEERIAWFEIHILPNLTIKQMAAFISKLFDDPSQSSELLSEAKKLNDSQAPK

SEQ ID NO: 1400 - protein, 58 aa, ARTIFICIAL SEQUENCE
  Engineered IL-6 binding polypeptide
VDAKYAKEEYKAWYEIHILPNLTVQQMAAFITKLFDDPSQSSELLSEAKKLNDSQAPK

SEQ ID NO: 1401 - protein, 58 aa, ARTIFICIAL SEQUENCE
  Engineered IL-6 binding polypeptide
VDAKYAKEEQHAWYEIHILPNLTIDQMAAFITKLFDDPSQSSELLSEAKKLNDSQAPK

SEQ ID NO: 1402 - protein, 58 aa, ARTIFICIAL SEQUENCE
  Engineered IL-6 binding polypeptide
VDAKYAKEERYAWFEIHALPNLTVSQMAAFITKLFDDPSQSSELLSEAKKLNDSQAPK

SEQ ID NO: 1403 - protein, 58 aa, ARTIFICIAL SEQUENCE
  Engineered IL-6 binding polypeptide
VDAKYAKEEYKAWIEIHLLPNLTIDQIAAFISKLFDDPSQSSELLSEAKKLNDSQAPK

SEQ ID NO: 1404 - protein, 58 aa, ARTIFICIAL SEQUENCE
  Engineered IL-6 binding polypeptide
VDAKYAKEERTAWFEIHLLPNLTVDQIAAFITKLFDDPSQSSELLSEAKKLNDSQAPK

SEQ ID NO: 1405 - protein, 58 aa, ARTIFICIAL SEQUENCE
  Engineered IL-6 binding polypeptide
VDAKYAKEEKHAWWEIHKLPNLTINQMAAFITKLFDDPSQSSELLSEAKKLNDSQAPK

SEQ ID NO: 1406 - protein, 58 aa, ARTIFICIAL SEQUENCE
  Engineered IL-6 binding polypeptide
VDAKYAKEEKMAWFEIHVLPNLTISQIAAFITKLFDDPSQSSELLSEAKKLNDSQAPK

SEQ ID NO: 1407 - protein, 58 aa, ARTIFICIAL SEQUENCE
  Engineered IL-6 binding polypeptide
VDAKYAKEEFDAWTEIHLLPNLTVDQMAAFISKLFDDPSQSSELLSEAKKLNDSQAPK

SEQ ID NO: 1408 - protein, 58 aa, ARTIFICIAL SEQUENCE
  Engineered IL-6 binding polypeptide
VDAKYAKEERDAWFEIHRLPNLTVSQMAAFITKLFDDPSQSSELLSEAKKLNDSQAPK

SEQ ID NO: 1409 - protein, 58 aa, ARTIFICIAL SEQUENCE
  Engineered IL-6 binding polypeptide
VDAKYAKEEAVAWTEIHLLPNLTIDQMAAFITKLFDDPSQSSELLSEAKKLNDSQAPK

SEQ ID NO: 1410 - protein, 58 aa, ARTIFICIAL SEQUENCE
  Engineered IL-6 binding polypeptide
VDAKYAKEEWYAWREIHILPNLTVEQVAAFITKLFDDPSQSSELLSEAKKLNDSQAPK

SEQ ID NO: 1411 - protein, 58 aa, ARTIFICIAL SEQUENCE
  Engineered IL-6 binding polypeptide
VDAKYAKEEFHAWYEIHILPNLTVDQMAAFITKLFDDPSQSSELLSEAKKLNDSQAPK

SEQ ID NO: 1412 - protein, 58 aa, ARTIFICIAL SEQUENCE
  Engineered IL-6 binding polypeptide
VDAKYAKEEYEAWTEIHLLPNLTIDQMAAFITKLFDDPSQSSELLSEAKKLNDSQAPK

SEQ ID NO: 1413 - protein, 58 aa, ARTIFICIAL SEQUENCE
  Engineered IL-6 binding polypeptide
VDAKYAKEEWDAWTEIHALPNLTIDQMAAFITKLFDDPSQSSELLSEAKKLNDSQAPK

SEQ ID NO: 1414 - protein, 58 aa, ARTIFICIAL SEQUENCE
  Engineered IL-6 binding polypeptide
VDAKYAKEESEAWTEIHLLPNLTIDQMAAFITKLFDDPSQSSELLSEAKKLNDSQAPK

SEQ ID NO: 1415 - protein, 58 aa, ARTIFICIAL SEQUENCE
  Engineered IL-6 binding polypeptide
VDAKYAKEEFTAWSEIHNLPNLTVEQMAAFITKLFDDPSQSSELLSEAKKLNDSQAPK

SEQ ID NO: 1416 - protein, 58 aa, ARTIFICIAL SEQUENCE
  Engineered IL-6 binding polypeptide
VDAKYAKEEADAWHEIHILPNLTVEQMAAFITKLFDDPSQSSELLSEAKKLNDSQAPK

SEQ ID NO: 1417 - protein, 58 aa, ARTIFICIAL SEQUENCE
  Engineered IL-6 binding polypeptide
VDAKYAKEEKAAWFEIHILPNLTVDQMAAFITKLFDDPSQSSELLSEAKKLNDSQAPK

SEQ ID NO: 1418 - protein, 58 aa, ARTIFICIAL SEQUENCE
  Engineered IL-6 binding polypeptide
VDAKYAKEERRAWHEIHILPNLTVEQMAAFISKLFDDPSQSSELLSEAKKLNDSQAPK

SEQ ID NO: 1419 - protein, 58 aa, ARTIFICIAL SEQUENCE
  Engineered IL-6 binding polypeptide
VDAKYAKEERDAWWEIHKLPNLTVDQMAAFITKLFDDPSQSSELLSEAKKLNDSQAPK

SEQ ID NO: 1420 - protein, 58 aa, ARTIFICIAL SEQUENCE
  Engineered IL-6 binding polypeptide
VDAKYAKEEAYAWKEIHILPNLTIDQMAAFISKLFDDPSQSSELLSEAKKLNDSQAPK

SEQ ID NO: 1421 - protein, 58 aa, ARTIFICIAL SEQUENCE
  Engineered IL-6 binding polypeptide
VDAKYAKEERAAWTEIHNLPNLTIDQMAAFITKLFDDPSQSSELLSEAKKLNDSQAPK

SEQ ID NO: 1422 - protein, 58 aa, ARTIFICIAL SEQUENCE
  Engineered IL-6 binding polypeptide
VDAKYAKEEYAAWTEIHKLPNLTIDQMAAFITKLFDDPSQSSELLSEAKKLNDSQAPK

SEQ ID NO: 1423 - protein, 58 aa, ARTIFICIAL SEQUENCE
  Engineered IL-6 binding polypeptide
VDAKYAKEERTAWMEIHGLPNLTIEQMAAFISKLFDDPSQSSELLSEAKKLNDSQAPK

SEQ ID NO: 1424 - protein, 58 aa, ARTIFICIAL SEQUENCE
  Engineered IL-6 binding polypeptide
VDAKYAKEEWTAWNEIHLLPNLTIEQMAAFITKLFDDPSQSSELLSEAKKLNDSQAPK

SEQ ID NO: 1425 - protein, 58 aa, ARTIFICIAL SEQUENCE
  Engineered IL-6 binding polypeptide
VDAKYAKEEKDAWFEIHILPNLTVHQIAAFISKLFDDPSQSSELLSEAKKLNDSQAPK

SEQ ID NO: 1426 - protein, 58 aa, ARTIFICIAL SEQUENCE
  Engineered IL-6 binding polypeptide
VDAKYAKEEKSAWREIHLLPNLTIEQMAAFISKLFDDPSQSSELLSEAKKLNDSQAPK

SEQ ID NO: 1427 - protein, 58 aa, ARTIFICIAL SEQUENCE
  Engineered IL-6 binding polypeptide
VDAKYAKEEYTAWLEIHALPNLTITQMAAFITKLFDDPSQSSELLSEAKKLNDSQAPK

SEQ ID NO: 1428 - protein, 58 aa, ARTIFICIAL SEQUENCE
  Engineered IL-6 binding polypeptide
VDAKYAKEEKMAWMEIHKLPNLTIDQMAAFITKLFDDPSQSSELLSEAKKLNDSQAPK

SEQ ID NO: 1429 - protein, 58 aa, ARTIFICIAL SEQUENCE
  Engineered IL-6 binding polypeptide
VDAKYAKEEYHAWYEIHLLPNLTVEQIAAFITKLFDDPSQSSELLSEAKKLNDSQAPK

SEQ ID NO: 1430 - protein, 58 aa, ARTIFICIAL SEQUENCE
  Engineered IL-6 binding polypeptide
VDAKYAKEEKDAWFEIHALPNLTVDQMAAFISKLFDDPSQSSELLSEAKKLNDSQAPK

SEQ ID NO: 1431 - protein, 58 aa, ARTIFICIAL SEQUENCE
  Engineered IL-6 binding polypeptide
VDAKYAKEERAAWFEIHLLPNLTVEQMAAFITKLFDDPSQSSELLSEAKKLNDSQAPK

SEQ ID NO: 1432 - protein, 58 aa, ARTIFICIAL SEQUENCE
  Engineered IL-6 binding polypeptide
VDAKYAKEEYMAWLEIHNLPNLTVEQMAAFITKLFDDPSQSSELLSEAKKLNDSQAPK

SEQ ID NO: 1433 - protein, 58 aa, ARTIFICIAL SEQUENCE
  Engineered IL-6 binding polypeptide
VDAKYAKEEYIAWREIHLLPNLTIDQMAAFITKLFDDPSQSSELLSEAKKLNDSQAPK

SEQ ID NO: 1434 - protein, 58 aa, ARTIFICIAL SEQUENCE
  Engineered IL-6 binding polypeptide
VDAKYAKEEKAAWHEIHVLPNLTISQMAAFITKLFDDPSQSSELLSEAKKLNDSQAPK

SEQ ID NO: 1435 - protein, 58 aa, ARTIFICIAL SEQUENCE
  Engineered IL-6 binding polypeptide
VDAKYAKEEWQAWNEIHLLPNLTIDQMAAFISKLFDDPSQSSELLSEAKKLNDSQAPK

SEQ ID NO: 1436 - protein, 58 aa, ARTIFICIAL SEQUENCE
  Engineered IL-6 binding polypeptide
VDAKYAKEEWEAWFEIHLLPNLTISQMAAFITKLFDDPSQSSELLSEAKKLNDSQAPK

SEQ ID NO: 1437 - protein, 58 aa, ARTIFICIAL SEQUENCE
  Engineered IL-6 binding polypeptide
VDAKYAKEEYHAWWEIHKLPNLTISQMAAFITKLFDDPSQSSELLSEAKKLNDSQAPK

SEQ ID NO: 1438 - protein, 58 aa, ARTIFICIAL SEQUENCE
  Engineered IL-6 binding polypeptide
VDAKYAKEEYAAWVEIHALPNLTVEQMAAFITKLFDDPSQSSELLSEAKKLNDSQAPK

SEQ ID NO: 1439 - protein, 58 aa, ARTIFICIAL SEQUENCE
  Engineered IL-6 binding polypeptide
VDAKYAKEERMAWHEIHILPNLTVQQMAAFISKLFDDPSQSSELLSEAKKLNDSQAPK

SEQ ID NO: 1440 - protein, 58 aa, ARTIFICIAL SEQUENCE
  Engineered IL-6 binding polypeptide
VDAKYAKEERDAWYEIHNLPNLTIDQMAAFISKLFDDPSQSSELLSEAKKLNDSQAPK

SEQ ID NO: 1441 - protein, 58 aa, ARTIFICIAL SEQUENCE
  Engineered IL-6 binding polypeptide
VDAKYAKEESYAWWEIHKLPNLTVEQMAAFISKLFDDPSQSSELLSEAKKLNDSQAPK

SEQ ID NO: 1442 - protein, 58 aa, ARTIFICIAL SEQUENCE
  Engineered IL-6 binding polypeptide
VDAKYAKEEKRAWKEIHILPNLTINQMAAFITKLFDDPSQSSELLSEAKKLNDSQAPK

SEQ ID NO: 1443 - protein, 58 aa, ARTIFICIAL SEQUENCE
  Engineered IL-6 binding polypeptide
VDAKYAKEEKEAWFEIHALPNLTVEQIAAFITKLFDDPSQSSELLSEAKKLNDSQAPK

SEQ ID NO: 1444 - protein, 58 aa, ARTIFICIAL SEQUENCE
  Engineered IL-6 binding polypeptide
VDAKYAKEEYEAWNEIHKLPNLTVSQMAAFISKLFDDPSQSSELLSEAKKLNDSQAPK

SEQ ID NO: 1445 - protein, 58 aa, ARTIFICIAL SEQUENCE
  Engineered IL-6 binding polypeptide
VDAKYAKEEAAAWMEIHLLPNLTIDQMAAFITKLFDDPSQSSELLSEAKKLNDSQAPK

SEQ ID NO: 1446 - protein, 58 aa, ARTIFICIAL SEQUENCE
  Engineered IL-6 binding polypeptide
VDAKYAKEERNAWEEIHLLPNLTINQIAAFITKLFDDPSQSSELLSEAKKLNDSQAPK

SEQ ID NO: 1447 - protein, 58 aa, ARTIFICIAL SEQUENCE
  Engineered IL-6 binding polypeptide
VDAKYAKEEAYAWHEIHILPNLTVDQMAAFITKLFDDPSQSSELLSEAKKLNDSQAPK

SEQ ID NO: 1448 - protein, 58 aa, ARTIFICIAL SEQUENCE
  Engineered IL-6 binding polypeptide
VDAKYAKEEANAWFEIHVLPNLTVEQMAAFITKLFDDPSQSSELLSEAKKLNDSQAPK

SEQ ID NO: 1449 - protein, 58 aa, ARTIFICIAL SEQUENCE
  Engineered IL-6 binding polypeptide
VDAKYAKEEKNAWTEIHKLPNLTVDQMAAFITKLFDDPSQSSELLSEAKKLNDSQAPK

SEQ ID NO: 1450 - protein, 58 aa, ARTIFICIAL SEQUENCE
  Engineered IL-6 binding polypeptide
VDAKYAKEEYDAWYEIHLLPNLTISQMAAFISKLFDDPSQSSELLSEAKKLNDSQAPK

SEQ ID NO: 1451 - protein, 58 aa, ARTIFICIAL SEQUENCE
  Engineered IL-6 binding polypeptide
VDAKYAKEERLAWAEIHKLPNLTIEQVAAFISKLFDDPSQSSELLSEAKKLNDSQAPK

SEQ ID NO: 1452 - protein, 58 aa, ARTIFICIAL SEQUENCE
  Engineered IL-6 binding polypeptide
VDAKYAKEERAAWNEIHILPNLTVQQMAAFITKLFDDPSQSSELLSEAKKLNDSQAPK

SEQ ID NO: 1453 - protein, 58 aa, ARTIFICIAL SEQUENCE
  Engineered IL-6 binding polypeptide
VDAKYAKEEAAAWDEIHRLPNLTVDQIAAFITKLFDDPSQSSELLSEAKKLNDSQAPK

SEQ ID NO: 1454 - protein, 58 aa, ARTIFICIAL SEQUENCE
  Engineered IL-6 binding polypeptide
VDAKYAKEEKEAWWEIHGLPNLTVNQMAAFITKLFDDPSQSSELLSEAKKLNDSQAPK

SEQ ID NO: 1455 - protein, 58 aa, ARTIFICIAL SEQUENCE
  Engineered IL-6 binding polypeptide
VDAKYAKEERKAWYEIHTLPNLTINQMAAFITKLFDDPSQSSELLSEAKKLNDSQAPK

SEQ ID NO: 1456 - protein, 58 aa, ARTIFICIAL SEQUENCE
  Engineered IL-6 binding polypeptide
VDAKYAKEERNAWYEIHILPNLTIEQMAAFITKLFDDPSQSSELLSEAKKLNDSQAPK

SEQ ID NO: 1457 - protein, 58 aa, ARTIFICIAL SEQUENCE
  Engineered IL-6 binding polypeptide
VDAKYAKEEKLAWMEIHLLPNLTIEQMAAFITKLFDDPSQSSELLSEAKKLNDSQAPK

SEQ ID NO: 1458 - protein, 58 aa, ARTIFICIAL SEQUENCE
  Engineered IL-6 binding polypeptide
VDAKYAKEEYMAWLEIHNLPNLTVDQMAAFITKLFDDPSQSSELLSEAKKLNDSQAPK

SEQ ID NO: 1459 - protein, 58 aa, ARTIFICIAL SEQUENCE
  Engineered IL-6 binding polypeptide
VDAKYAKEESDAWREIHLLPNLTIEQMAAFISKLFDDPSQSSELLSEAKKLNDSQAPK

SEQ ID NO: 1460 - protein, 58 aa, ARTIFICIAL SEQUENCE
  Engineered IL-6 binding polypeptide
VDAKYAKEEKEAWYEIHQLPNLTVNQMAAFISKLFDDPSQSSELLSEAKKLNDSQAPK

SEQ ID NO: 1461 - protein, 58 aa, ARTIFICIAL SEQUENCE
  Engineered IL-6 binding polypeptide
VDAKYAKEEKQAWYEIHNLPNLTINQMAAFITKLFDDPSQSSELLSEAKKLNDSQAPK

SEQ ID NO: 1462 - protein, 58 aa, ARTIFICIAL SEQUENCE
  Engineered IL-6 binding polypeptide
VDAKYAKEEYEAWTEIHRLPNLTIDQMAAFITKLFDDPSQSSELLSEAKKLNDSQAPK

SEQ ID NO: 1463 - protein, 58 aa, ARTIFICIAL SEQUENCE
  Engineered IL-6 binding polypeptide
VDAKYAKEEKDAWYEIHVLPNLTISQMAAFITKLFDDPSQSSELLSEAKKLNDSQAPK

SEQ ID NO: 1464 - protein, 58 aa, ARTIFICIAL SEQUENCE
  Engineered IL-6 binding polypeptide
VDAKYAKEERIAWYEIHILPNLTISQMAAFITKLFDDPSQSSELLSEAKKLNDSQAPK

SEQ ID NO: 1465 - protein, 58 aa, ARTIFICIAL SEQUENCE
  Engineered IL-6 binding polypeptide
VDAKYAKEEQYAWTEIHKLPNLTIDQMAAFITKLFDDPSQSSELLSEAKKLNDSQAPK

SEQ ID NO: 1466 - protein, 58 aa, ARTIFICIAL SEQUENCE
  Engineered IL-6 binding polypeptide
VDAKYAKEESDAWWEIHKLPNLTIDQMAAFITKLFDDPSQSSELLSEAKKLNDSQAPK

SEQ ID NO: 1467 - protein, 58 aa, ARTIFICIAL SEQUENCE
  Engineered IL-6 binding polypeptide
VDAKYAKEEKFAWNEIHLLPNLTIEQMAAFITKLFDDPSQSSELLSEAKKLNDSQAPK

SEQ ID NO: 1468 - protein, 58 aa, ARTIFICIAL SEQUENCE
  Engineered IL-6 binding polypeptide
VDAKYAKEERAAWYEIHLLPNLTVNQIAAFITKLFDDPSQSSELLSEAKKLNDSQAPK

SEQ ID NO: 1469 - protein, 58 aa, ARTIFICIAL SEQUENCE
  Engineered IL-6 binding polypeptide
VDAKYAKEEFHAWWEIHKLPNLTVEQVAAFITKLFDDPSQSSELLSEAKKLNDSQAPK

SEQ ID NO: 1470 - protein, 58 aa, ARTIFICIAL SEQUENCE
  Engineered IL-6 binding polypeptide
VDAKYAKEEKQAWLEIHILPNLTVGQIAAFITKLFDDPSQSSELLSEAKKLNDSQAPK

SEQ ID NO: 1471 - protein, 58 aa, ARTIFICIAL SEQUENCE
  Engineered IL-6 binding polypeptide
VDAKYAKEEHLAWTEIHLLPNLTINQMAAFITKLFDDPSQSSELLSEAKKLNDSQAPK

SEQ ID NO: 1472 - protein, 58 aa, ARTIFICIAL SEQUENCE
  Engineered IL-6 binding polypeptide
VDAKYAKEEATAWREIHLLPNLTINQMAAFITKLFDDPSQSSELLSEAKKLNDSQAPK

SEQ ID NO: 1473 - protein, 58 aa, ARTIFICIAL SEQUENCE
  Engineered IL-6 binding polypeptide
VDAKYAKEEKRAWYEIHILPNLTVEQVAAFITKLFDDPSQSSELLSEAKKLNDSQAPK

SEQ ID NO: 1474 - protein, 58 aa, ARTIFICIAL SEQUENCE
  Engineered IL-6 binding polypeptide
VDAKYAKEEYEAWTEIHLLPNLTVSQMAAFITKLFDDPSQSSELLSEAKKLNDSQAPK

SEQ ID NO: 1475 - protein, 58 aa, ARTIFICIAL SEQUENCE
  Engineered IL-6 binding polypeptide
VDAKYAKEESNAWWEIHKLPNLTVNQVAAFITKLFDDPSQSSELLSEAKKLNDSQAPK

SEQ ID NO: 1476 - protein, 58 aa, ARTIFICIAL SEQUENCE
  Engineered IL-6 binding polypeptide
VDAKYAKEEKRAWMEIHLLPNLTVDQIAAFITKLFDDPSQSSELLSEAKKLNDSQAPK

SEQ ID NO: 1477 - protein, 58 aa, ARTIFICIAL SEQUENCE
  Engineered IL-6 binding polypeptide
VDAKYAKEEKFAWKEIHILPNLTVDQIAAFITKLFDDPSQSSELLSEAKKLNDSQAPK

SEQ ID NO: 1478 - protein, 58 aa, ARTIFICIAL SEQUENCE
  Engineered IL-6 binding polypeptide
VDAKYAKEERDAWFEIHVLPNLTILQMAAFITKLFDDPSQSSELLSEAKKLNDSQAPK

SEQ ID NO: 1479 - protein, 58 aa, ARTIFICIAL SEQUENCE
  Engineered IL-6 binding polypeptide
VDAKYAKEEHYAWTEIHILPNLTVNQMAAFITKLFDDPSQSSELLSEAKKLNDSQAPK

SEQ ID NO: 1480 - protein, 58 aa, ARTIFICIAL SEQUENCE
  Engineered IL-6 binding polypeptide
VDAKYAKEEKRAWMEIHLLPNLTVHQMAAFITKLFDDPSQSSELLSEAKKLNDSQAPK

SEQ ID NO: 1481 - protein, 58 aa, ARTIFICIAL SEQUENCE
  Engineered IL-6 binding polypeptide
VDAKYAKEEYDAWVEIHLLPNLTVEQMAAFITKLFDDPSQSSELLSEAKKLNDSQAPK

SEQ ID NO: 1482 - protein, 58 aa, ARTIFICIAL SEQUENCE
  Engineered IL-6 binding polypeptide
VDAKYAKEEHTAWFEIHILPNLTISQIAAFITKLFDDPSQSSELLSEAKKLNDSQAPK

SEQ ID NO: 1483 - protein, 58 aa, ARTIFICIAL SEQUENCE
  Engineered IL-6 binding polypeptide
VDAKYAKEELQAWKEIHILPNLTVDQIAAFITKLFDDPSQSSELLSEAKKLNDSQAPK

SEQ ID NO: 1484 - protein, 58 aa, ARTIFICIAL SEQUENCE
  Engineered IL-6 binding polypeptide
VDAKYAKEEYDAWLEIHLLPNLTISQMAAFITKLFDDPSQSSELLSEAKKLNDSQAPK

SEQ ID NO: 1485 - protein, 58 aa, ARTIFICIAL SEQUENCE
  Engineered IL-6 binding polypeptide
VDAKYAKEEARAWREIHILPNLTVEQMAAFITKLFDDPSQSSELLSEAKKLNDSQAPK

SEQ ID NO: 1486 - protein, 58 aa, ARTIFICIAL SEQUENCE
  Engineered IL-6 binding polypeptide
VDAKYAKEERNAWFEIHILPNLTIDQMAAFITKLFDDPSQSSELLSEAKKLNDSQAPK

SEQ ID NO: 1487 - protein, 58 aa, ARTIFICIAL SEQUENCE
  Engineered IL-6 binding polypeptide
VDAKYAKEEAYAWHEIHVLPNLTIDQMAAFITKLFDDPSQSSELLSEAKKLNDSQAPK

SEQ ID NO: 1488 - protein, 58 aa, ARTIFICIAL SEQUENCE
  Engineered IL-6 binding polypeptide
VDAKYAKEEYFAWTEIHKLPNLTINQMAAFITKLFDDPSQSSELLSEAKKLNDSQAPK

SEQ ID NO: 1489 - protein, 58 aa, ARTIFICIAL SEQUENCE
  Engineered IL-6 binding polypeptide
VDAKYAKEEAGAWYEIHLLPNLTVEQMAAFITKLFDDPSQSSELLSEAKKLNDSQAPK

SEQ ID NO: 1490 - protein, 58 aa, ARTIFICIAL SEQUENCE
  Engineered IL-6 binding polypeptide
VDAKYAKEEKKAWYEIHILPNLTIEQMAAFISKLFDDPSQSSELLSEAKKLNDSQAPK

SEQ ID NO: 1491 - protein, 58 aa, ARTIFICIAL SEQUENCE
  Engineered IL-6 binding polypeptide
VDAKYAKEEKQAWFEIHLLPNLTIEQMAAFISKLFDDPSQSSELLSEAKKLNDSQAPK

SEQ ID NO: 1492 - protein, 58 aa, ARTIFICIAL SEQUENCE
  Engineered IL-6 binding polypeptide
VDAKYAKEEWHAWLEIHNLPNLTIEQMAAFISKLFDDPSQSSELLSEAKKLNDSQAPK

SEQ ID NO: 1493 - protein, 58 aa, ARTIFICIAL SEQUENCE
  Engineered IL-6 binding polypeptide
VDAKYAKEEKSAWIEIHNLPNLTINQMAAFITKLFDDPSQSSELLSEAKKLNDSQAPK

SEQ ID NO: 1494 - protein, 58 aa, ARTIFICIAL SEQUENCE
  Engineered IL-6 binding polypeptide
VDAKYAKEEYQAWNEIHILPNLTINQIAAFITKLFDDPSQSSELLSEAKKLNDSQAPK

SEQ ID NO: 1495 - protein, 58 aa, ARTIFICIAL SEQUENCE
  Engineered IL-6 binding polypeptide
VDAKYAKEEAYAWVEIHKLPNLTVTQVAAFISKLFDDPSQSSELLSEAKKLNDSQAPK

SEQ ID NO: 1496 - protein, 58 aa, ARTIFICIAL SEQUENCE
  Engineered IL-6 binding polypeptide
VDAKYAKEEYDAWMEIHNLPNLTIEQMAAFITKLFDDPSQSSELLSEAKKLNDSQAPK

SEQ ID NO: 1497 - protein, 58 aa, ARTIFICIAL SEQUENCE
  Engineered IL-6 binding polypeptide
VDAKYAKEEYEAWVEIHNLPNLTIEQMAAFITKLFDDPSQSSELLSEAKKLNDSQAPK

SEQ ID NO: 1498 - protein, 58 aa, ARTIFICIAL SEQUENCE
  Engineered IL-6 binding polypeptide
VDAKYAKEEREAWNEIHLLPNLTIEQIAAFITKLFDDPSQSSELLSEAKKLNDSQAPK

SEQ ID NO: 1499 - protein, 58 aa, ARTIFICIAL SEQUENCE
  Engineered IL-6 binding polypeptide
VDAKYAKEEKRAWYEIHILPNLTVGQMAAFISKLFDDPSQSSELLSEAKKLNDSQAPK

SEQ ID NO: 1500 - protein, 58 aa, ARTIFICIAL SEQUENCE
  Engineered IL-6 binding polypeptide
VDAKYAKEEKEAWTEIHILPNLTVEQMAAFITKLFDDPSQSSELLSEAKKLNDSQAPK

SEQ ID NO: 1501 - protein, 58 aa, ARTIFICIAL SEQUENCE
  Engineered IL-6 binding polypeptide
VDAKYAKEEFEAWFEIHKLPNLTVEQMAAFITKLFDDPSQSSELLSEAKKLNDSQAPK

SEQ ID NO: 1502 - protein, 58 aa, ARTIFICIAL SEQUENCE
  Engineered IL-6 binding polypeptide
VDAKYAKEESQAWTEIHLLPNLTIEQMAAFISKLFDDPSQSSELLSEAKKLNDSQAPK

SEQ ID NO: 1503 - protein, 58 aa, ARTIFICIAL SEQUENCE
  Engineered IL-6 binding polypeptide
VDAKYAKEERKAWFEIHLLPNLTTQQRSAFISKLFDDPSQSSELLSEAKKLNDSQAPK

SEQ ID NO: 1504 - protein, 58 aa, ARTIFICIAL SEQUENCE
  Engineered IL-6 binding polypeptide
VDAKYAKEERSAWFEIHTLPNLTVQQIAAFIWKLYDDPSQSSELLSEAKKLNDSQAPK

SEQ ID NO: 1505 - protein, 58 aa, ARTIFICIAL SEQUENCE
  Engineered IL-6 binding polypeptide
VDAKYAKEERQAWWEIHSLPNLTVDQMAAFIVKLMDDPSQSSELLSEAKKLNDSQAPK

SEQ ID NO: 1506 - protein, 58 aa, ARTIFICIAL SEQUENCE
  Engineered IL-6 binding polypeptide
VDAKYAKEQAKAWWEIHVLPNLTVHQVAAFITKLFDDPSQSSELLSEAKKLNDSQAPK

SEQ ID NO: 1507 - protein, 58 aa, ARTIFICIAL SEQUENCE
  Engineered IL-6 binding polypeptide
VDAKYAKEERDAWHEIQILPNLTITQMAAFISKLFDDPSQSSELLSEAKKLNDSQAPK

SEQ ID NO: 1508 - protein, 58 aa, ARTIFICIAL SEQUENCE
  Engineered IL-6 binding polypeptide
VDAKYAKEEQRAWTEIHVLPNLTVQQMAAFITKLFDDPSQSSELLSEAKKLNDSQAPK

SEQ ID NO: 1509 - protein, 58 aa, ARTIFICIAL SEQUENCE
  Engineered IL-6 binding polypeptide
VDAKYAKETQHAWWEIHKLPNLTVSQMAAFITKLFDDPSQSSELLSEAKKLNDSQAPK

SEQ ID NO: 1510 - protein, 58 aa, ARTIFICIAL SEQUENCE
  Engineered IL-6 binding polypeptide
VDAKYAKEDRTAWWEIHKLPNLTAEQMAAFITKLFDDPSQSSELLSEAKKLNDSQAPK

SEQ ID NO: 1511 - protein, 58 aa, ARTIFICIAL SEQUENCE
  Engineered IL-6 binding polypeptide
VDAKYAKEERDAWREIHALPNLTVDQLVAFITKLFDDPSQSSELLSEAKKLNDSQAPK

SEQ ID NO: 1512 - protein, 58 aa, ARTIFICIAL SEQUENCE
  Engineered IL-6 binding polypeptide
VDAKYAKEEQRAWREIHLLPNLTIEQMAAFIWKLLDDPSQSSELLSEAKKLNDSQAPK

SEQ ID NO: 1513 - protein, 58 aa, ARTIFICIAL SEQUENCE
  Engineered IL-6 binding polypeptide
VDAKYAKEEQRAWTEIHVLPNLTVSQMSAFISKLFDDPSQSSELLSEAKKLNDSQAPK

SEQ ID NO: 1514 - protein, 58 aa, ARTIFICIAL SEQUENCE
  Engineered IL-6 binding polypeptide
VDAKYAKEQHQAWNEIHLLPNLTVNQMAAFIVKLFDDPSQSSELLSEAKKLNDSQAPK

SEQ ID NO: 1515 - protein, 58 aa, ARTIFICIAL SEQUENCE
  Engineered IL-6 binding polypeptide
VDAKYAKEEHAAWLEIHLLPNLTVKQMAAFIGKLMDDPSQSSELLSEAKKLNDSQAPK

SEQ ID NO: 1516 - protein, 58 aa, ARTIFICIAL SEQUENCE
  Engineered IL-6 binding polypeptide
VDAKYAKEEQMAWFEIHLLPNLTVGQMAAFIQKLFDDPSQSSELLSEAKKLNDSQAPK

SEQ ID NO: 1517 - protein, 58 aa, ARTIFICIAL SEQUENCE
  Engineered IL-6 binding polypeptide
VDAKYAKEERSAWFEIHILPNLTISQKSAFIVKLFDDPSQSSELLSEAKKLNDSQAPK

SEQ ID NO: 1518 - protein, 58 aa, ARTIFICIAL SEQUENCE
  Engineered IL-6 binding polypeptide
VDAKYAKEERSAWYEIHLLPNLTADQMAAFIAKLFDDPSQSSELLSEAKKLNDSQAPK

SEQ ID NO: 1519 - protein, 58 aa, ARTIFICIAL SEQUENCE
  Engineered IL-6 binding polypeptide
VDAKYAKEEQRAWYEIHLLPNLTIEQLTAFIMKLMDDPSQSSELLSEAKKLNDSQAPK

SEQ ID NO: 1520 - protein, 58 aa, ARTIFICIAL SEQUENCE
  Engineered IL-6 binding polypeptide
VDAKYAKEERQAWWEITILPNLTIEQVAAFITKLFDDPSQSSELLSEAKKLNDSQAPK

SEQ ID NO: 1521 - protein, 58 aa, ARTIFICIAL SEQUENCE
  Engineered IL-6 binding polypeptide
VDAKYAKEDYEAWVEIHVLPNLTVEQKAAFIVKLFDDPSQSSELLSEAKKLNDSQAPK

SEQ ID NO: 1522 - protein, 58 aa, ARTIFICIAL SEQUENCE
  Engineered IL-6 binding polypeptide
VDAKYAKEVYNAWHEIHVLPNLTTLQISAFISKLFDDPSQSSELLSEAKKLNDSQAPK

SEQ ID NO: 1523 - protein, 58 aa, ARTIFICIAL SEQUENCE
  Engineered IL-6 binding polypeptide
VDAKYAKEERKAWWEIHLLPNLTVRQTAAFIWKLLDDPSQSSELLSEAKKLNDSQAPK

SEQ ID NO: 1524 - protein, 58 aa, ARTIFICIAL SEQUENCE
  Engineered IL-6 binding polypeptide
VDAKYAKEEQAAWWEIHMLPNLTIEQRTAFIIKLFDDPSQSSELLSEAKKLNDSQAPK

SEQ ID NO: 1525 - protein, 58 aa, ARTIFICIAL SEQUENCE
  Engineered IL-6 binding polypeptide
VDAKYAKEEQTAWFEIHILPNLTVNQRVAFITKLFDDPSQSSELLSEAKKLNDSQAPK

SEQ ID NO: 1526 - protein, 58 aa, ARTIFICIAL SEQUENCE
  Engineered IL-6 binding polypeptide
VDAKYAKEEALAWREIHLLPNLTTVQISAFIAKLLDDPSQSSELLSEAKKLNDSQAPK

SEQ ID NO: 1527 - protein, 58 aa, ARTIFICIAL SEQUENCE
  Engineered IL-6 binding polypeptide
VDAKYAKEEKFAWTEIHLLPNLTIGQQAAFIWKLFDDPSQSSELLSEAKKLNDSQAPK

SEQ ID NO: 1528 - protein, 58 aa, ARTIFICIAL SEQUENCE
  Engineered IL-6 binding polypeptide
VDAKYAKEERAAWWEIHVLPNLTVSQMYAFITKLFDDPSQSSELLSEAKKLNDSQAPK

SEQ ID NO: 1529 - protein, 58 aa, ARTIFICIAL SEQUENCE
  Engineered IL-6 binding polypeptide
VDAKYAKEEQRAWYEIHLLPNLTVRQRGAFITKLFDDPSQSSELLSEAKKLNDSQAPK

SEQ ID NO: 1530 - protein, 58 aa, ARTIFICIAL SEQUENCE
  Engineered IL-6 binding polypeptide
VDAKYAKEHRQAWMEIHLLPNLTIRQIAAFIAKLFDDPSQSSELLSEAKKLNDSQAPK

SEQ ID NO: 1531 - protein, 58 aa, ARTIFICIAL SEQUENCE
  Engineered IL-6 binding polypeptide
VDAKYAKEEKVAWHEIHVLPNLTVSQISAFITKLFDDPSQSSELLSEAKKLNDSQAPK

SEQ ID NO: 1532 - protein, 58 aa, ARTIFICIAL SEQUENCE
  Engineered IL-6 binding polypeptide
VDAKYAKEEKHAWYEIHLLPNLTISQLSAFIMKLFDDPSQSSELLSEAKKLNDSQAPK

SEQ ID NO: 1533 - protein, 58 aa, ARTIFICIAL SEQUENCE
  Engineered IL-6 binding polypeptide
VDAKYAKESAFAWWEIHLLPNLTVEQIAAFIWKLLDDPSQSSELLSEAKKLNDSQAPK

SEQ ID NO: 1534 - protein, 58 aa, ARTIFICIAL SEQUENCE
  Engineered IL-6 binding polypeptide
VDAKYAKEEQVAWREIHVLPNLTVEQVKAFINKLFDDPSQSSELLSEAKKLNDSQAPK

SEQ ID NO: 1535 - protein, 58 aa, ARTIFICIAL SEQUENCE
  Engineered IL-6 binding polypeptide
VDAKYAKEEMDAWTEIHILPNLTVEQMEAFIVKLFDDPSQSSELLSEAKKLNDSQAPK

SEQ ID NO: 1536 - protein, 58 aa, ARTIFICIAL SEQUENCE
  Engineered IL-6 binding polypeptide
VDAKYAKEEGRAWYEIHALPNLTVEQMSAFIIKLFDDPSQSSELLSEAKKLNDSQAPK

SEQ ID NO: 1537 - protein, 58 aa, ARTIFICIAL SEQUENCE
  Engineered IL-6 binding polypeptide
VDAKYAKEERNAWFEIHILPNLTLSQITAFIWKLLDDPSQSSELLSEAKKLNDSQAPK

SEQ ID NO: 1538 - protein, 58 aa, ARTIFICIAL SEQUENCE
  Engineered IL-6 binding polypeptide
VDAKYAKEEHNAWTEIHRLPNLTVKQTSAFIEKLFDDPSQSSELLSEAKKLNDSQAPK

SEQ ID NO: 1539 - protein, 58 aa, ARTIFICIAL SEQUENCE
  Engineered IL-6 binding polypeptide
VDAKYAKEEFKAWWEIHVLPNLTADQVAAFIVKLFDDPSQSSELLSEAKKLNDSQAPK

SEQ ID NO: 1540 - protein, 58 aa, ARTIFICIAL SEQUENCE
  Engineered IL-6 binding polypeptide
VDAKYAKEQHMAWTEIHLLPNLTVAQMAAFIVKLFDDPSQSSELLSEAKKLNDSQAPK

SEQ ID NO: 1541 - protein, 58 aa, ARTIFICIAL SEQUENCE
  Engineered IL-6 binding polypeptide
VDAKYAKEEQRAWWEIHLLPNLTARQTAAFIWKLMDDPSQSSELLSEAKKLNDSQAPK

SEQ ID NO: 1542 - protein, 58 aa, ARTIFICIAL SEQUENCE
  Engineered IL-6 binding polypeptide
VDAKYAKEQKSAWTEIHLLPNLTVHQISAFIAKLLDDPSQSSELLSEAKKLNDSQAPK

SEQ ID NO: 1543 - protein, 58 aa, ARTIFICIAL SEQUENCE
  Engineered IL-6 binding polypeptide
VDAKYAKEEHLAWKEIHKLPNLTVIQMAAFITKLFDDPSQSSELLSEAKKLNDSQAPK

SEQ ID NO: 1544 - protein, 58 aa, ARTIFICIAL SEQUENCE
  Engineered IL-6 binding polypeptide
VDAKYAKEERAAWWEIHMLPNLTADQMAAFIAKLFDDPSQSSELLSEAKKLNDSQAPK

SEQ ID NO: 1545 - protein, 58 aa, ARTIFICIAL SEQUENCE
  Engineered IL-6 binding polypeptide
VDAKYAKEQRTAWWEIHILPNLTVKQLVAFINKLFDDPSQSSELLSEAKKLNDSQAPK

SEQ ID NO: 1546 - protein, 58 aa, ARTIFICIAL SEQUENCE
  Engineered IL-6 binding polypeptide
VDAKYAKEEQIAWFEIHLLPNLTVGQRTAFIVKLFDDPSQSSELLSEAKKLNDSQAPK

SEQ ID NO: 1547 - protein, 58 aa, ARTIFICIAL SEQUENCE
  Engineered IL-6 binding polypeptide
VDAKYAKEERRAWFEISVLPNLTVDQTAAFIMKLFDDPSQSSELLSEAKKLNDSQAPK

SEQ ID NO: 1548 - protein, 58 aa, ARTIFICIAL SEQUENCE
  Engineered IL-6 binding polypeptide
VDAKYAKEEADAWMEIHILPNLTVLQRSAFIIKLFDDPSQSSELLSEAKKLNDSQAPK

SEQ ID NO: 1549 - protein, 58 aa, ARTIFICIAL SEQUENCE
  Engineered IL-6 binding polypeptide
VDAKYAKEEREAWFEIHVLPNLTIKQISAFIHKLFDDPSQSSELLSEAKKLNDSQAPK

SEQ ID NO: 1550 - protein, 58 aa, ARTIFICIAL SEQUENCE
  Engineered IL-6 binding polypeptide
VDAKYAKEERRAWFEIHTLPNLTVEQIEAFINKLFDDPSQSSELLSEAKKLNDSQAPK

SEQ ID NO: 1551 - protein, 58 aa, ARTIFICIAL SEQUENCE
  Engineered IL-6 binding polypeptide
VDAKYAKEERAAWWEIHGLPNLTVWQTAAFIVKLFDDPSQSSELLSEAKKLNDSQAPK

SEQ ID NO: 1552 - protein, 58 aa, ARTIFICIAL SEQUENCE
  Engineered Z variant
AEAKYAKELGWATWEIFNLPNLTGVQVKAFIDKLRDDPSQSSELLSEAKKLNDSQAPK

SEQ ID NO: 1553 - protein, 58 aa, ARTIFICIAL SEQUENCE
  Engineered Z variant
VDAKYAKELGWATWEIFNLPNLTGVQVKAFIDKLRDDPSQSSELLSEAKKLNDSQAPK

SEQ ID NO: 1554 - protein, 46 aa, ARTIFICIAL SEQUENCE
  Engineered albumin binding polypeptide
LAEAKEAANAELDSYGVSDFYKRLIDKAKTVEGVEALKDAILAALP

SEQ ID NO: 1555 - protein, 184 aa, HOMO SAPIENS
PVPPGEDSKDVAAPHRQPLTSSERIDKQIRYILDGISALRKETCNKSNMCESSKEALAENNLNLPKMAEKDGCFQSGFNEETCLVKIITGLLEFEVYLEYLQNRFESSEEQARAVQMSTKVLIQFLQKKAKNLDAITTPDPTTNASLLTKLQAQNQWLQDMTTHLILRSFKEFLQSSLRALRQM

SEQ ID NO: 1556 - protein, 188 aa, MUS MUSCULUS
MFPTSQVRRGDFTEDTTPNRPVYTTSQVGGLITHVLWEIVEMRKELCNGNSDCMNNDDALAENNLKLPEIQRNDGCYQTGYNQEICLLKISSGLLEYHSYLEYMKNNLKDNKKDKARVLQRDTETLIHIFNQEVKDLHKIVLPTPISNALLTDKLESQKEWLRTKTIQFILKSLEEFLKVTLRSTRQT

SEQ ID NO: 1557 - protein, 451 aa, ARTIFICIAL SEQUENCE
  Heavy chain of antibody Ada
EVQLVESGGGLVQPGRSLRLSCAASGFTFDDYAMHWVRQAPGKGLEWVSAITWNSGHIDYADSVEGRFTISRDNAKNSLYLQMNSLRAEDTAVYYCAKVSYLSTASSLDYWGQGTLVTVSSASTKGPSVFPLAPSSKSTSGGTAALGCLVKDYFPEPVTVSWNSGALTSGVHTFPAVLQSSGLYSLSSVVTVPSSSLGTQTYICNVNHKPSNTKVDKKVEPKSCDKTHTCPPCPAPELLGGPSVFLFPPKPKDTLMISRTPEVTCVVVDVSHEDPEVKFNWYVDGVEVHNAKTKPREEQYNSTYRVVSVLTVLHQDWLNGKEYKCKVSNKALPAPIEKTISKAKGQPREPQVYTLPPSREEMTKNQVSLTCLVKGFYPSDIAVEWESNGQPENNYKTTPPVLDSDGSFFLYSKLTVDKSRWQQGNVFSCSVMHEALHNHYTQKSLSLSPGK

SEQ ID NO: 1558 - protein, 214 aa, ARTIFICIAL SEQUENCE
  Light chain of antibody Ada
DIQMTQSPSSLSASVGDRVTITCRASQGIRNYLAWYQQKPGKAPKLLIYAASTLQSGVPSRFSGSGSGTDFTLTISSLQPEDVATYYCQRYNRAPYTFGQGTKVEIKRTVAAPSVFIFPPSDEQLKSGTASVVCLLNNFYPREAKVQWKVDNALQSGNSQESVTEQDSKDSTYSLSSTLTLSKADYEKHKVYACEVTHQGLSSPVTKSFNRGEC

SEQ ID NO: 1559 - protein, 451 aa, ARTIFICIAL SEQUENCE
  Heavy chain of antibody Ada2
EVQLVESGGGLVQPGRSLRLSCAASGFTFDDYAMHWVRQAPGKGLEWVSAITWNSGHIDYADSVEGRFTISRDNAKNSLYLQMNSLRAEDTAVYYCAKVSYLSTASSLDYWGQGTLVTVSSASTKGPSVFPLAPSSKSTSGGTAALGCLVKDYFPEPVTVSWNSGALTSGVHTFPAVLQSSGLYSLSSVVTVPSSSLGTQTYICNVNHKPSNTKVDKKVEPKSCDKTHTCPPCPAPELLGGPSVFLFPPKPKDTLMISRTPEVTCVVVDVSHEDPEVKFNVYVDGVEVHNAKTKPREEQYNSTYRVVSVLTVLHQDWLNGKEYKCKVSNKALPAPIEKTISKAKGQPREPQVYTLPPSRDELTKNQVSLTCLVKGFYPSDIAVEWESNGQPENNYKTTPPVLDSDGSFFLYSKLTVDKSRWQQGNVFSCSVMHEALHNHYTQKSLSLSPGK

SEQ ID NO: 1560 - DNA, 24 bp, ARTIFICIAL SEQUENCE
  PCR primer
tgcttccggctcgtatgttgtgtg

SEQ ID NO: 1561 - DNA, 21 bp, ARTIFICIAL SEQUENCE
  PCR primer
cggaaccagagccaccaccgg

SEQ ID NO: 1562 - DNA, 21 bp, ARTIFICIAL SEQUENCE
  Sequencing primer
cggaaccagagccaccaccgg

SEQ ID NO: 1563 - DNA, 147 bp, ARTIFICIAL SEQUENCE
  Library oligonucleotide
  misc_feature (39)..(47): n is a, c, g, or t
  misc_feature (54)..(56): n is a, c, g, or t
  misc_feature (63)..(68): n is a, c, g, or t
  misc_feature (84)..(89): n is a, c, g, or t
  misc_feature (93)..(98): n is a, c, g, or t
  misc_feature (108)..(110): n is a, c, g, or t
  misc_feature (117)..(119): n is a, c, g, or t
aaataaatctcgaggtagatgccaaatacgccaaagaannnnnnnnngcgtggnnngagatcnnnnnnctgcctaacctcaccnnnnnncaannnnnngccttcatcnnnaaattannngatgacccaagccagagctcattattta

SEQ ID NO: 1564 - DNA, 147 bp, ARTIFICIAL SEQUENCE
  Library oligonucleotide
  misc_feature (39)..(47): n is a, c, g, or t
  misc_feature (51)..(56): n is a, c, g, or t
  misc_feature (63)..(68): n is a, c, g, or t
  misc_feature (84)..(89): n is a, c, g, or t
  misc_feature (93)..(98): n is a, c, g, or t
  misc_feature (108)..(110): n is a, c, g, or t
  misc_feature (117)..(119): n is a, c, g, or t
aaataaatctcgaggtagatgccaaatacgccaaagaannnnnnnnngctnnnnnngagatcnnnnnnctgccgaacctgaccnnnnnncagnnnnnngccttcatcnnnaaattannngatgacccaagccagagctcattattta
